(19) United States
(12) Patent Application Publication
(10) Pub. No.: US 2020/0270622 A1
(43) Pub. Date: Aug. 27, 2020

(54) TISSUE-PREFERRED PROMOTERS AND METHODS OF USE

(71) Applicant: PIONEER HI-BRED INTERNATIONAL, INC., JOHNSTON, IA (US)

(72) Inventors: ALEXANDRE DA SILVA CONCEICAO, WILMINGTON, DE (US); ALLISON M FINCH, WILMINGTON, DE (US); WILLIAM JAMES GORDON-KAMM, URBANDALE, IA (US); THEODORE M KLEIN, WILMINGTON, DE (US); KEITH S LOWE, JOHNSTON, IA (US)

(73) Assignee: PIONEER HI-BRED INTERNATIONAL, INC., JOHNSTON, IA (US)

(21) Appl. No.: 16/650,334

(22) PCT Filed: Sep. 19, 2018
(86) PCT No.: PCT/US18/51697

§ 371 Date: Mar. 24, 2020

Related U.S. Application Data
(60) Provisional application No. 62/562,663, filed on Sep. 25, 2017.

(51) Int. Cl. C12N 15/82

(52) U.S. Cl. CPC C12N 15/8234; C12N 15/8241

(57) ABSTRACT

Compositions and methods for regulating expression of heterologous nucleotide sequences in a plant are provided. Compositions include tissue-preferred promoters operably linked to morphogenic genes. Also provided is a method for expressing a heterologous nucleotide sequence in a plant using a promoter sequence disclosed herein operably linked to a morphogenic gene. DNA constructs comprising a promoter operably linked to a morphogenic gene and further comprising a heterologous nucleotide sequence of interest are also provided.

### CROSS-REFERENCE TO RELATED APPLICATIONS

[0001] This application claims the benefit of PCT Application Serial Number PCT/US2018/051697, filed Sep. 19, 2018, which claims the benefit of U.S. Provisional Application No. 62/562,663, filed Sep. 25, 2017, both of which are hereby incorporated herein by reference in their entireties.

### FIELD OF THE DISCLOSURE

[0002] The present disclosure relates to the field of plant molecular biology, more particularly to regulation of gene expression in plants.

### REFERENCE TO SEQUENCE LISTING SUBMITTED ELECTRONICALLY

[0003] The official copy of the sequence listing is submitted electronically via EFS-Web as an ASCII formatted sequence listing with a file named 20200324_7453-US-PCT_ST25 created on Mar. 24, 2020 and having a size of 995,640 bytes and is filed concurrently with the specification. The sequence listing contained in this ASCII formatted document is part of the specification and is herein incorporated by reference in its entirety.

### BACKGROUND OF THE DISCLOSURE

[0004] Expression of heterologous DNA sequences in a plant host is dependent upon the presence of operably linked promoters, including promoters, that are functional within the plant host. Choice of the promoter sequence will determine when and where within the organism the heterologous DNA sequence is expressed. Where expression in specific tissues or organs is desired, tissue-preferred promoters may be used. Where gene expression in response to a stimulus is desired, inducible promoters are the regulatory element of choice. In contrast, where continuous expression is desired throughout the cells of a plant, constitutive promoters are utilized. Additional regulatory sequences upstream and/or downstream from the core promoter sequence may be included in expression constructs of transformation vectors to bring about varying levels of expression of heterologous nucleotide sequences in a transgenic plant.

[0005] Frequently it is desirable to express a DNA sequence in particular tissues or organs of a plant. For example, use of tissue-preferred promoters operably linked to morphogenic genes that promote cell proliferation are useful for the efficient recovery of transgenic events during the transformation process. Such tissue-preferred promoters also have utility in expressing trait genes and/or pathogen-resistance proteins in the desired plant tissue to enhance plant yield and resistance to pathogens. Alternatively, it might be desirable to inhibit expression of a native DNA sequence within a plant's tissues to achieve a desired phenotype. In this case, such inhibition might be accomplished with transformation of the plant to comprise a tissue-preferred promoter operably linked to an antisense nucleotide sequence, such that expression of the antisense sequence produces an RNA transcript that interferes with translation of the mRNA of the native DNA sequence.

[0006] Additionally, it may be desirable to express a DNA sequence in plant tissues that are in a particular growth or developmental phase such as, for example, cell division or elongation. Such a DNA sequence may be used to promote or inhibit plant growth processes, thereby affecting the growth rate or architecture of the plant.

[0007] Thus, there is a need for the isolation and characterization of tissue-preferred promoters, particularly promoters that can serve as regulatory elements for the controlled expression of growth stimulating genes, including morphogenic genes, that provide a strong burst of expression of the genes to stimulate in vitro growth and morphogenesis immediately after Agrobacterium-mediated transformation, which then diminishes and is virtually “off” in the tissues of a plant where ectopic overexpression would cause abnormal growth and development.

### SUMMARY OF THE DISCLOSURE

[0008] Compositions and methods for regulating gene expression in a plant are provided. More particularly, the promoters of the disclosure confer tissue-preferred expression in the epidermis L1 (outer layers) of plant tissue. Certain aspects of the disclosure include a nucleic acid molecule comprising a morphogenic gene cassette comprising a tissue-preferred promoter having a nucleotide sequence selected from the group consisting of a nucleotide sequence of at least one of SEQ ID NOS: 1-59, 108-110, 124-126, 149-152, and 189, wherein the nucleotide sequence initiates transcription in a plant cell; a nucleotide sequence having at least 95% identical to at least one of SEQ ID NOS: 1-59, 108-110, 124-126, 149-152, and 189, wherein the nucleotide sequence initiates transcription in a plant cell; a nucleotide sequence having at least 70% identity to at least one of SEQ ID NOS: 1-59, 108-110, 124-126, 149-152, and 189, wherein the nucleotide sequence initiates transcription in a plant cell; a fragment or variant of the nucleotide sequence of at least one of SEQ ID NOS: 1-59, 108-110, 124-126, 149-152, and 189, wherein the fragment or variant of the nucleotide sequence initiates transcription in a plant cell; and at least 100 contiguous nucleotides of a nucleotide sequence of at least one of SEQ ID NOS: 1-59, 108-110, 124-126, 149-152, and 189, wherein the at least 100 contiguous nucleotides of the nucleotide sequence initiates transcription in a plant cell; wherein the tissue-preferred promoter is operably linked to a morphogenic gene. Also included are expression cassettes comprising a morphogenic gene cassette. Vectors comprising an expression cassette comprising a morphogenic gene cassette are also included.

[0009] Further, plant cells and plants comprising an expression cassette comprising a morphogenic gene cassette are provided comprising a tissue-preferred promoter having a nucleotide sequence selected from the group consisting of a nucleotide sequence of at least one of SEQ ID NOS: 1-59, 108-110, 124-126, 149-152, and 189, wherein the nucleotide sequence initiates transcription in a plant cell; a nucleotide sequence having at least 95% identical to at least one of SEQ ID NOS: 1-59, 108-110, 124-126, 149-152, and 189, wherein the nucleotide sequence initiates transcription in a plant cell; a nucleotide sequence having at least 70% identity to at least one of SEQ ID NOS: 1-59, 108-110, 124-126, 149-152, and 189, wherein the nucleotide sequence initiates transcription in a plant cell; a fragment or variant of the nucleotide sequence of at least one of SEQ ID NOS: 1-59, 108-110, 124-126, 149-152, and 189, wherein the fragment or variant of the nucleotide sequence initiates transcription in a plant cell; and at least 100 contiguous nucleotides of a nucleotide sequence of at least one of SEQ ID NOS: 1-59, 108-110, 124-126, 149-152, and 189, wherein the at least 100 contiguous nucleotides of the nucleotide sequence initiates transcription in a plant cell; wherein the tissue-preferred promoter is operably linked to a morphogenic gene. Plant cells and plants comprising an expression cassette comprising a morphogenic gene cassette include monocots, dicots, and gymnosperms. Plant cells and plants comprising an expression cassette comprising a morphogenic gene cassette include monocots, dicots, and gymnosperms including, but not limited to, maize, alfalfa, sorghum, rice, millet, soybean, wheat, cotton, sunflower, barley, oats, rye, flax, sugarcane, banana, cassava, common bean, cowpea, tomato, potato, beet, grape, Eucalyptus, poplar, pine, douglas fir, citrus, papaya, cacao, cucumber, apple, Capsicum, bamboo, Triticale, melon, and Brassica are also provided. The present disclosure also provides a plant cell or plant comprising an expression cassette comprising a morphogenic gene cassette, wherein the morphogenic gene of the morphogenic gene cassette encodes a WUS/WOX homeobox polypeptide, wherein the WUS/WOX homeobox polypeptide comprises an amino acid sequence of any of SEQ ID NOS: 61, 63, 65, 67, 69, 71, 73, 75, 77, 79, 81, 83, 85, 87, 89, 91, 93, 95, 97, 99, 101, 103, 105, 107, 128, 130, 132, 134, 136, 138, 140, 142, 144, 146, or 148; or wherein the WUS/WOX homeobox polypeptide is encoded by a nucleotide sequence of any of SEQ ID NOS: 60, 62, 64, 66, 68, 70, 72, 74, 76, 78, 80, 82, 84, 86, 88, 90, 92, 94, 96, 98, 100, 102, 104, 106, 127, 129, 131, 133, 135, 137, 139, 141, 143, 145, or 147. Also provided is a plant cell or plant comprising an expression cassette comprising a morphogenic gene cassette, wherein the morphogenic gene of the morphogenic gene cassette encodes a gene product involved in plant metabolism, organ development, stem cell development, cell growth stimulation, organogenesis, regeneration, somatic embryogenesis initiation, accelerated somatic embryo maturation, initiation and/or development of the apical meristem, initiation and/or development of shoot meristem, initiation and/or development of shoots, or a combination thereof.

[0010] The present disclosure also provides plant cells and plants comprising an expression cassette comprising a morphogenic gene cassette, wherein the expression cassette further comprises a trait gene cassette comprising a heterologous polynucleotide encoding a gene product conferring nutritional enhancement, increased yield, abiotic stress tolerance, drought tolerance, cold tolerance, herbicide tolerance, pest resistance, pathogen resistance, insect resistance, nitrogen use efficiency (NUE), disease resistance, or an ability to alter a metabolic pathway. The present disclosure also provides plant cells and plants comprising an expression cassette comprising a morphogenic gene cassette, wherein the expression cassette further comprises a a trait gene cassette comprising heterologous polynucleotide encoding a gene product conferring nutritional enhancement, increased yield, abiotic stress tolerance, drought tolerance, cold tolerance, herbicide tolerance, pest resistance, pathogen resistance, insect resistance, nitrogen use efficiency (NUE), disease resistance, or an ability to alter a metabolic pathway and a site specific recombinase cassette comprising a nucleotide sequence encoding a site-specific recombinase selected from the group consisting of FLP, FLPe, KD, Cre, SSV1, lambda Int, phi C31 Int, HK022, R, B2, B3, Gin, Tn1721, CinH, ParA, Tn5053, Bxb1, TP907-1, or U153, wherein the site-specific recombinase is operably linked to a constitutive promoter, an inducible promoter, a tissue-specific promoter, or a developmentally regulated promoter. Also provides are constitutive promoters, inducible promoters, tissue-specific promoters, and developmentally regulated promoters selected from the group consisting of UBI, LLDAV, EVCV, DMMV, BSV(AY) PRO, CYMV PRO FL, UBIZM PRO, SI-UB3 PRO, SB-UBI PRO (ALT1), USB1ZM PRO, ZM-GOS2 PRO, ZM-H1B PRO (1.2 KB), IN2-2, NOS, the −135 version of 35S, ZM-ADF PRO (ALT2), AXIG1, DR5, XVE, GLB1, OLE, LTP2, HSP17.7, HSP26, HSP18A, AT-HSP811, AT-HSP811L, GM-HSP173B, promoters activated by tetracycline, ethamethsulfuron or chlorsulfuron, PLTP, PLTP1, PLTP2, PLTP3, SDR, LGL, LEA-14A, or LEA-D34. Also provided are plant cells and plants wherein the morphogenic gene cassette and the site-specific recombinase cassette of the expression cassette are transiently expressed in the plant cells and plants and the trait gene cassette of the expression cassette is stably incorporated into the genome of the plant cells and plants. Also provided are plant cells and plants wherein the morphogenic gene cassette and the site-specific recombinase cassette of the expression cassette are excised from the plant cells and plants and the trait gene cassette of the expression cassette is stably incorporated into the genome of the plant cells and plants. A seed of a plant is also provided wherein the seed comprises the trait gene cassette of the espression cassette.

[0011] The disclosure further provides an expression cassette comprising a recombinant polynucleotide comprising a nucleotide sequence capable of initiating transcription in a plant or a plant cell, wherein the nucleotide sequence has at least 100 contiguous nucleotides of a nucleotide sequence selected from the group consisting of at least one of SEQ ID NOS: 1-59, 108-110, 124-126, 149-152, and 189, wherein the nucleotide sequence capable of initiating transcription is operably linked to a morphogenic gene.

[0012] Also provided is an expression cassette comprising a recombinant polynucleotide comprising a functional fragment or variant capable of initiating transcription in a plant or a plant cell, wherein the functional fragment or variant is derived from a nucleotide sequence selected from the group consisting of at least one of SEQ ID NOS: 1-59, 108-110, 124-126, 149-152, and 189, wherein the functional fragment or variant capable of initiating transcription is operably linked to a morphogenic gene.

[0013] The disclosure also provides an expression cassette comprising a recombinant polynucleotide comprising a nucleotide sequence capable of initiating transcription in a plant or a plant cell, wherein the nucleotide sequence has at least 70% identity to a nucleotide sequence selected from the group consisting of at least one of SEQ ID NOS: 1-59, 108-110, 124-126, 149-152, and 189, wherein the nucleotide sequence capable of initiating transcription is operably linked to a morphogenic gene.

[0014] Also provided is an expression cassette comprising a recombinant polynucleotide comprising a nucleotide sequence capable of initiating transcription in a plant or a plant cell, wherein the nucleotide sequence has at least 95% identity to a nucleotide sequence selected from the group consisting of at least one of SEQ ID NOS: 1-59, 108-110, 124-126, 149-152, and 189, wherein the nucleotide sequence capable of initiating transcription is operably linked to a morphogenic gene.

[0015] An expression cassette comprising a recombinant polynucleotide comprising a nucleotide sequence capable of initiating transcription in a plant or a plant cell, wherein the nucleotide sequence is selected from the group consisting of at least one of SEQ ID NOS: 1-59, 108-110, 124-126, 149-152, and 189, wherein the nucleotide sequence capable of initiating transcription is operably linked to a morphogenic gene is also provided.

[0016] Also provided are methods for producing a transgenic plant, the method comprising transforming a plant cell with a recombinant expression cassette comprising (a) a tissue-preferred promoter cassette, wherein the tissue-preferred promoter cassette comprises a nucleotide sequence selected from the group consisting of: at least one of SEQ ID NOS: 1-59, 108-110, 124-126, 149-152, and 189, wherein the nucleotide sequence initiates transcription in the plant cell; a nucleotide sequence that is at least 95% identical to at least one of SEQ ID NOS: 1-59, 108-110, 124-126, 149-152, and 189, wherein the nucleotide sequence initiates transcription in the plant cell; a nucleotide sequence that is at least 70% identical to at least one of SEQ ID NOS: 1-59, 108-110, 124-126, 149-152, and 189, wherein the nucleotide sequence initiates transcription in the plant cell; a nucleotide sequence that is a fragment or variant of at least one of SEQ ID NOS: 1-59, 108-110, 124-126, 149-152, and 189, wherein the nucleotide sequence initiates transcription in the plant cell; or a nucleotide sequence that is at least a 100-bp fragment of at least one of SEQ ID NOS: 1-59, 108-110, 124-126, 149-152, and 189, wherein the nucleotide sequence initiates transcription in the plant cell, wherein the nucleotide sequence is operably linked to a morphogenic gene and (b) a trait gene cassette comprising a heterologous polynucleotide of interest encoding a gene product conferring nutritional enhancement, increased yield, abiotic stress tolerance, drought tolerance, cold tolerance, herbicide tolerance, pest resistance, pathogen resistance, insect resistance, nitrogen use efficiency (NUE), disease resistance, or an ability to alter a metabolic pathway; selecting a transgenic plant cell having the recombinant expression cassette; and regenerating the transgenic plant from the transgenic plant cell.

[0017] Also provided are monocot plant cells, dicot plant cells, and gymnosperm plant cells useful in the methods for producing a transgenic plant of the disclosure. Plant cells useful in the methods of the disclosure include monocots, dicots, and gymnosperms including, but not limited to, maize, alfalfa, sorghum, rice, millet, soybean, wheat, cotton, sunflower, barley, oats, rye, flax, sugarcane, banana, cassava, common bean, cowpea, tomato, potato, beet, grape, Eucalyptus, poplar, pine, douglas fir, citrus, papaya, cacao, cucumber, apple, Capsicum, bamboo, Triticale, melon, and Brassica are also provided.

[0018] The present disclosure also provides methods for producing a transgenic plant, the method comprising transforming a plant cell with a recombinant expression cassette comprising a tissue-preferred promoter cassette disclosed herein, wherein the morphogenic gene encodes a WUS/WOX homeobox polypeptide, wherein the WUS/WOX homeobox polypeptide comprises an amino acid sequence of any of SEQ ID NOS: 61, 63, 65, 67, 69, 71, 73, 75, 77, 79, 81, 83, 85, 87, 89, 91, 93, 95, 97, 99, 101, 103, 105, 107, 128, 130, 132, 134, 136, 138, 140, 142, 144, 146, or 148; or wherein the WUS/WOX homeobox polypeptide is encoded by a nucleotide sequence of any of SEQ ID NOS: 60, 62, 64, 66, 68, 70, 72, 74, 76, 78, 80, 82, 84, 86, 88, 90, 92, 94, 96, 98, 100, 102, 104, 106, 127, 129, 131, 133, 135, 137, 139, 141, 143, 145, or 147. Also provided are methods for producing a transgenic plant, the method comprising transforming a plant cell with a recombinant expression cassette comprising a tissue-preferred promoter cassette disclosed herein, wherein the morphogenic gene encodes a gene product involved in plant metabolism, organ development, stem cell development, cell growth stimulation, organogenesis, regeneration, somatic embryogenesis initiation, accelerated somatic embryo maturation, initiation and/or development of the apical meristem, initiation and/or development of shoot meristem, initiation and/or development of shoots, or a combination thereof.

[0019] Also provided are methods for producing a transgenic plant, the method comprising transforming a plant cell with a recombinant expression cassette comprising a tissue-preferred promoter cassette disclosed herein, wherein the recombinant expression cassette further comprises a site-specific recombinase cassette comprising a nucleotide sequence encoding a site-specific recombinase selected from the group consisting of FLP, FLPe, KD, Cre, SSV1, lambda Int, phi C31 Int, HK022, R, B2, B3, Gin, Tn1721, CinH, ParA, Tn5053, Bxb1, TP907-1, or U153, wherein the site-specific recombinase is operably linked to a constitutive promoter, an inducible promoter, a tissue-specific promoter, or a developmentally regulated promoter. Also provided are methods for producing a transgenic plant, the method comprising transforming a plant cell with a recombinant expression cassette comprising a tissue-preferred promoter cassette and a site-specific recombinase cassette disclosed herein, wherein the constitutive promoter, the inducible promoter, the tissue-specific promoter, or the developmentally regulated promoter is selected from the group consisting of UBI, LLDAV, EVCV, DMMV, BSV(AY) PRO, CYMV PRO FL, UBIZM PRO, SI-UB3 PRO, SB-UBI PRO (ALT1), USB1ZM PRO, ZM-GOS2 PRO, ZM-H1B PRO (1.2 KB), IN2-2, NOS, the −135 version of 35S, ZM-ADF PRO (ALT2), AXIG1, DR5, XVE, GLB1, OLE, LTP2, HSP17.7, HSP26, HSP18A, AT-HSP811, AT-HSP811L, GM-HSP173B, promoters activated by tetracycline, ethamethsulfuron or chlorsulfuron, PLTP, PLTP1, PLTP2, PLTP3, SDR, LGL, LEA-14A, or LEA-D34.

[0020] Also provided are methods for producing a transgenic plant, wherein the method further comprises excising the tissue-preferred promoter cassette and the site-specific recombinase cassette from the recombinant expression cassette. Transgenic plants produced by the methods disclosed herein are also provided. Seed containing the trait gene cassette of the recombinant expression cassette produced from the transgenic plants produced by the methods disclosed herein are also provided.

[0021] Also provided are methods for producing a transgenic plant, wherein the tissue-preferred promoter cassette comprises a first T-DNA and the trait gene cassette comprises a second T-DNA. Also provided are methods for producing a transgenic plant, wherein the first T-DNA and the second T-DNA reside in the same bacterial strain for transforming the plant cell. Also provided are methods for producing a transgenic plant, wherein the methods further comprise segregating the first T-DNA away from the second T-DNA. Transgenic plants so produced are also provided. Seed of the transgenic plants so produced, wherein the seed comprises the trait gene cassette of the recombinant expression cassette are also provided.

[0022] Also provided are methods for producing a transgenic plant, wherein the first T-DNA resides in a first bacterial strain and the second T-DNA resides in a second bacterial strain and the first bacterial strain and the second bacterial strain are mixed in a ratio for transforming the plant cell. Also provided are methods for producing a transgenic plant, wherein the methods further comprise segregating the first T-DNA away from the second T-DNA. Transgenic plants so produced are also provided. Seed of the transgenic plants so produced, wherein the seed comprises the trait gene cassette of the recombinant expression cassette are also provided.

[0023] Methods of improving somatic embryo maturation efficiency, the method comprising transforming a plant cell with a recombinant expression cassette comprising (a) a tissue-preferred promoter cassette, wherein the tissue-preferred promoter cassette comprises a nucleotide sequence selected from the group consisting of: at least one of SEQ ID NOS: 1-59, 108-110, 124-126, 149-152, and 189, wherein the nucleotide sequence initiates transcription in the plant cell; a nucleotide sequence that is at least 95% identical to at least one of SEQ ID NOS: 1-59, 108-110, 124-126, 149-152, and 189, wherein the nucleotide sequence initiates transcription in the plant cell; a nucleotide sequence that is at least 70% identical to at least one of SEQ ID NOS: 1-59, 108-110, 124-126, 149-152, and 189, wherein the nucleotide sequence initiates transcription in the plant cell; a nucleotide sequence that is a fragment or variant of at least one of SEQ ID NOS: 1-59, 108-110, 124-126, 149-152, and 189, wherein the nucleotide sequence initiates transcription in the plant cell; or a nucleotide sequence that is at least a 100-bp fragment of at least one of SEQ ID NOS: 1-59, 108-110, 124-126, 149-152, and 189, wherein the nucleotide sequence initiates transcription in the plant cell, wherein the nucleotide sequence is operably linked to a morphogenic gene and (b) a trait gene cassette comprising a heterologous polynucleotide of interest encoding a gene product conferring nutritional enhancement, increased yield, abiotic stress tolerance, drought tolerance, cold tolerance, herbicide tolerance, pest resistance, pathogen resistance, insect resistance, nitrogen use efficiency (NUE), disease resistance, or an ability to alter a metabolic pathway; selecting a transgenic plant cell having the recombinant expression cassette; and regenerating the transgenic plant from the transgenic plant cell, wherein the recombinant expression cassette results in improved somatic embryo maturation efficiency when compared to a transgenic plant cell not comprising the recombinant expression cassette.

[0024] Also provided are monocot plant cells, dicot plant cells, and gymnosperm plant cells useful in the methods of improving somatic embryo maturation efficiency of the disclosure. Plant cells useful in the methods of the disclosure include monocots, dicots, and gymnosperms including, but not limited to, maize, alfalfa, sorghum, rice, millet, soybean, wheat, cotton, sunflower, barley, oats, rye, flax, sugarcane, banana, cassava, common bean, cowpea, tomato, potato, beet, grape, Eucalyptus, poplar, pine, douglas fir, citrus, papaya, cacao, cucumber, apple, Capsicum, bamboo, Triticale, melon, and Brassica are also provided. The present disclosure also provides methods of improving somatic embryo maturation efficiency, the method comprising transforming a plant cell with a recombinant expression cassette comprising a tissue-preferred promoter cassette disclosed herein, wherein the morphogenic gene encodes a WUS/WOX homeobox polypeptide, wherein the WUS/WOX homeobox polypeptide comprises an amino acid sequence of any of SEQ ID NOS: 61, 63, 65, 67, 69, 71, 73, 75, 77, 79, 81, 83, 85, 87, 89, 91, 93, 95, 97, 99, 101, 103, 105, 107, 128, 130, 132, 134, 136, 138, 140, 142, 144, 146, or 148; or wherein the WUS/WOX homeobox polypeptide is encoded by a nucleotide sequence of any of SEQ ID NOS: 60, 62, 64, 66, 68, 70, 72, 74, 76, 78, 80, 82, 84, 86, 88, 90, 92, 94, 96, 98, 100, 102, 104, 106, 127, 129, 131, 133, 135, 137, 139, 141, 143, 145, or 147. Also provided are methods of improving somatic embryo maturation efficiency, the method comprising transforming a plant cell with a recombinant expression cassette comprising a tissue-preferred promoter cassette disclosed herein, wherein the morphogenic gene encodes a gene product involved in plant metabolism, organ development, stem cell development, cell growth stimulation, organogenesis, regeneration, somatic embryogenesis initiation, accelerated somatic embryo maturation, initiation and/or development of the apical meristem, initiation and/or development of shoot meristem, initiation and/or development of shoots, or a combination thereof.

[0025] Also provided are methods of improving somatic embryo maturation efficiency, the method comprising transforming a plant cell with a recombinant expression cassette comprising a tissue-preferred promoter cassette disclosed herein, wherein the recombinant expression cassette further comprises a site-specific recombinase cassette comprising a nucleotide sequence encoding a site-specific recombinase selected from the group consisting of FLP, FLPe, KD, Cre, SSV1, lambda Int, phi C31 Int, HK022, R, B2, B3, Gin, Tn1721, CinH, ParA, Tn5053, Bxb1, TP907-1, or U153, wherein the site-specific recombinase is operably linked to a constitutive promoter, an inducible promoter, a tissue-specific promoter, or a developmentally regulated promoter. Also provided are methods of improving somatic embryo maturation efficiency, the method comprising transforming a plant cell with a recombinant expression cassette comprising a tissue-preferred promoter cassette and a site-specific recombinase cassette disclosed herein, wherein the constitutive promoter, the inducible promoter, the tissue-specific promoter, or the developmentally regulated promoter is selected from the group consisting of UBI, LLDAV, EVCV, DMMV, BSV(AY) PRO, CYMV PRO FL, UBIZM PRO, SI-UB3 PRO, SB-UBI PRO (ALT1), USB1ZM PRO, ZM-GOS2 PRO, ZM-H1B PRO (1.2 KB), IN2-2, NOS, the −135 version of 35S, ZM-ADF PRO (ALT2), AXIG1, DR5, XVE, GLB1, OLE, LTP2, HSP17.7, HSP26, HSP18A, AT-HSP811, AT-HSP811L, GM-HSP173B, promoters activated by tetracycline, ethamethsulfuron or chlorsulfuron, PLTP, PLTP1, PLTP2, PLTP3, SDR, LGL, LEA-14A, or LEA-D34.

[0026] Also provided are methods of improving somatic embryo maturation efficiency, wherein the method further comprises excising the tissue-preferred promoter cassette and the site-specific recombinase cassette from the recombinant expression cassette. Transgenic plants produced by the methods disclosed herein are also provided. Seed containing the trait gene cassette of the recombinant expression cassette produced from the transgenic plants produced by the methods disclosed herein are also provided.

[0027] Also provided are methods of improving somatic embryo maturation efficiency, wherein the tissue-preferred promoter cassette comprises a first T-DNA and the trait gene cassette comprises a second T-DNA. Also provided are methods of improving somatic embryo maturation efficiency, wherein the first T-DNA and the second T-DNA reside in the same bacterial strain for transforming the plant cell. Also provided are methods of improving somatic embryo maturation efficiency, wherein the methods further comprise segregating the first T-DNA away from the second T-DNA. Transgenic plants so produced are also provided. Seed of the transgenic plants so produced, wherein the seed comprises the trait gene cassette of the recombinant expression cassette are also provided.

[0028] Also provided are methods of improving somatic embryo maturation efficiency, wherein the first T-DNA resides in a first bacterial strain and the second T-DNA resides in a second bacterial strain and the first bacterial strain and the second bacterial strain are mixed in a ratio for transforming the plant cell. Also provided are methods of improving somatic embryo maturation efficiency, wherein the methods further comprise segregating the first T-DNA away from the second T-DNA. Transgenic plants so produced are also provided. Seed of the transgenic plants so produced, wherein the seed comprises the trait gene cassette of the recombinant expression cassette are also provided.

[0029] Also provided are methods for producing a transgenic dicot plant or a transgenic gymnosperm plant, the method comprising transforming a dicot plant cell or a gymnosperm plant cell with a recombinant expression cassette comprising (a) a tissue-preferred promoter cassette, wherein the tissue-preferred promoter cassette comprises a nucleotide sequence selected from the group consisting of: at least one of SEQ ID NOS: 1-59, 108-110, 124-126, 149-152, and 189, wherein the nucleotide sequence initiates transcription in the plant cell; a nucleotide sequence that is at least 95% identical to at least one of SEQ ID NOS: 1-59, 108-110, 124-126, 149-152, and 189, wherein the nucleotide sequence initiates transcription in the plant cell; a nucleotide sequence that is at least 70% identical to at least one of SEQ ID NOS: 1-59, 108-110, 124-126, 149-152, and 189, wherein the nucleotide sequence initiates transcription in the plant cell; a nucleotide sequence that is a fragment or variant of at least one of SEQ ID NOS: 1-59, 108-110, 124-126, 149-152, and 189, wherein the nucleotide sequence initiates transcription in the plant cell; or a nucleotide sequence that is at least a 100-bp fragment of at least one of SEQ ID NOS: 1-59, 108-110, 124-126, 149-152, and 189, wherein the nucleotide sequence initiates transcription in the plant cell, wherein the nucleotide sequence initiating transcription in the plant cell is operably linked to a nucleotide sequence encoding a WUS/WOX homeobox polypeptide and (b) a trait gene cassette comprising a heterologous polynucleotide of interest encoding a gene product conferring nutritional enhancement, increased yield, abiotic stress tolerance, drought tolerance, cold tolerance, herbicide tolerance, pest resistance, pathogen resistance, insect resistance, nitrogen use efficiency (NUE), disease resistance, or an ability to alter a metabolic pathway; allowing expression of the recombinant expression cassette in each transformed plant cell to form a somatic embryo or a shoot; and germinating the somatic embryo or culturing the shoot to form the transgenic dicot plant or the transgenic gymnosperm plant wherein the transgenic dicot plant or the transgenic gymnosperm plant comprises the heterologous polynucleotide of interest. The disclosed method also provides the somatic embryo or the shoot formation within about 21 to about 28 days after initiation of transforming the dicot cell or the gymnosperm cell.

[0030] Also provided are gymnosperm plant cells useful in the methods for producing a transgenic plant of the disclosure. Gymnosperm plant cells useful in the methods of the disclosure including, but not limited to, pine and douglas fir are also provided. Also provided are dicot plant cells useful in the methods for producing a transgenic plant of the disclosure. Dicot plant cells useful in the methods of the disclosure including, but not limited to, alfalfa, soybean, cotton, sunflower, flax, cassava, common bean, cowpea, tomato, potato, beet, grape, Eucalyptus, poplar, citrus, papaya, cacao, cucumber, apple, Capsicum, melon, or Brassica are also provided.

[0031] The present disclosure also provides methods for producing a transgenic dicot plant or a transgenic gymnosperm plant, the method comprising transforming a dicot plant cell or a gymnosperm plant cell with a recombinant expression cassette comprising a tissue-preferred promoter cassette disclosed herein, wherein the WUS/WOX homeobox polypeptide comprises an amino acid sequence of any of SEQ ID NOS: 61, 63, 65, 67, 69, 71, 73, 75, 77, 79, 81, 83, 85, 87, 89, 91, 93, 95, 97, 99, 101, 103, 105, 107, 128, 130, 132, 134, 136, 138, 140, 142, 144, 146, or 148; or wherein the WUS/WOX homeobox polypeptide is encoded by a nucleotide sequence of any of SEQ ID NOS: 60, 62, 64, 66, 68, 70, 72, 74, 76, 78, 80, 82, 84, 86, 88, 90, 92, 94, 96, 98, 100, 102, 104, 106, 127, 129, 131, 133, 135, 137, 139, 141, 143, 145, or 147. Also provided are methods for producing a transgenic plant, the method comprising transforming a plant cell with a recombinant expression cassette comprising a tissue-preferred promoter cassette disclosed herein, wherein the nucleotide sequence encoding the WUS/WOX homeobox polypeptide encodes a gene product involved in plant metabolism, organ development, stem cell development, cell growth stimulation, organogenesis, regeneration, somatic embryogenesis initiation, accelerated somatic embryo maturation, initiation and/or development of the apical meristem, initiation and/or development of shoot meristem, initiation and/or development of shoots, or a combination thereof.

[0032] Also provided are methods for producing a a transgenic dicot plant or a transgenic gymnosperm plant, the method comprising transforming a dicot plant cell or a gymnosperm plant cell with a recombinant expression cassette comprising a tissue-preferred promoter cassette disclosed herein, wherein the recombinant expression cassette further comprises a site-specific recombinase cassette comprising a nucleotide sequence encoding a site-specific recombinase selected from the group consisting of FLP, FLPe, KD, Cre, SSV1, lambda Int, phi C31 Int, HK022, R, B2, B3, Gin, Tn1721, CinH, ParA, Tn5053, Bxb1, TP907-1, or U153, wherein the site-specific recombinase is operably linked to a constitutive promoter, an inducible promoter, a tissue-specific promoter, or a developmentally regulated promoter. Also provided are methods for producing a transgenic dicot plant or a transgenic gymnosperm plant, the method comprising transforming a dicot plant cell or a gymnosperm plant cell with a recombinant expression cassette comprising a tissue-preferred promoter cassette and a site-specific recombinase cassette disclosed herein, wherein the constitutive promoter, the inducible promoter, the tissue-specific promoter, or the developmentally regulated promoter is selected from the group consisting of UBI, LLDAV, EVCV, DMMV, BSV(AY) PRO, CYMV PRO FL, UBIZM PRO, SI-UB3 PRO, SB-UBI PRO (ALT1), USB1ZM PRO, ZM-GOS2 PRO, ZM-H1B PRO (1.2 KB), IN2-2, NOS, the −135 version of 35S, ZM-ADF PRO (ALT2), AXIG1, DR5, XVE, GLB1, OLE, LTP2, HSP17.7, HSP26, HSP18A, AT-HSP811, AT-HSP811L, GM-HSP173B, promoters activated by tetracycline, ethamethsulfuron or chlorsulfuron, PLTP, PLTP1, PLTP2, PLTP3, SDR, LGL, LEA-14A, or LEA-D34.

[0033] Also provided are methods for producing a transgenic dicot plant or a transgenic gymnosperm plant, wherein the method further comprises excising the tissue-preferred promoter cassette and the site-specific recombinase cassette from the recombinant expression cassette. Transgenic dicot plants or transgenic gymnosperm plantsproduced by the methods disclosed herein are also provided. Seed containing the trait gene cassette of the recombinant expression cassette produced from the transgenic dicot plants or the transgenic gymnosperm plants produced by the methods disclosed herein are also provided.

[0034] Also provided are methods for producing transgenic dicot plants or transgenic gymnosperm plants, wherein the tissue-preferred promoter cassette comprises a first T-DNA and the trait gene cassette comprises a second T-DNA. Also provided are methods for producing a transgenic dicot plant or a transgenic gymnosperm plant, wherein the first T-DNA and the second T-DNA reside in the same bacterial strain for transforming the plant cell. Also provided are methods for producing a transgenic dicot plant or a transgenic gymnosperm plant, wherein the methods further comprise segregating the first T-DNA away from the second T-DNA. Transgenic plants so produced are also provided. Seed of the transgenic dicot plants or transgenic gymnosperm plants so produced, wherein the seed comprises the trait gene cassette of the recombinant expression cassette are also provided.

[0035] Also provided are methods for producing a transgenic dicot plant or a transgenic gymnosperm plant, wherein the first T-DNA resides in a first bacterial strain and the second T-DNA resides in a second bacterial strain and the first bacterial strain and the second bacterial strain are mixed in a ratio for transforming the dicot plant cell or the gymnosperm plant cell. Also provided are methods for producing a transgenic dicot plant or a transgenic gymnosperm plant, wherein the methods further comprise segregating the first T-DNA away from the second T-DNA. Transgenic plants so produced are also provided. Seed of the transgenic dicot plants or transgenic gymnosperm plants so produced, wherein the seed comprises the trait gene cassette of the recombinant expression cassette are also provided.

[0036] Also provided are methods for producing a transgenic dicot plant or a transgenic gymnosperm plant, comprising: (a) transforming a cell of a dicot explant or a gymnosperm explant with a recombinant expression cassette comprising a trait gene cassette comprising a heterologous gene of interest and a morphogenic gene cassette comprising a nucleotide sequence encoding a WUS/WOX homeobox polypeptide; (b) allowing expression of the recombinant expression cassette of (a) in each transformed cell to form a somatic embryo or a shoot; and (c) germinating the somatic embryo or culturing the shoot to form the transgenic dicot plant or the transgenic gymnosperm plant. The disclosed method also provides the somatic embryo or the shoot formation within about 21 to about 28 days after initiation of transforming the dicot cell or the gymnosperm cell.

[0037] Also provided are dicot plant cells and gymnosperm plant cells useful in the methods for producing a transgenic dicot plant or a transgenic gymnosperm plant of the disclosure. Plant cells useful in the methods of the disclosure include dicots and gymnosperms including, but not limited to, alfalfa, soybean, cotton, sunflower, flax, cassava, common bean, cowpea, tomato, potato, beet, grape, Eucalyptus, poplar, pine, douglas fir, citrus, papaya, cacao, cucumber, apple, Capsicum, melon, or Brassica.

[0038] The present disclosure also provides methods for producing a transgenic dicot plant or a transgenic gymnosperm plant, wherein the WUS/WOX homeobox polypeptide comprises an amino acid sequence of any of SEQ ID NOS: 61, 63, 65, 67, 69, 71, 73, 75, 77, 79, 81, 83, 85, 87, 89, 91, 93, 95, 97, 99, 101, 103, 105, 107, 128, 130, 132, 134, 136, 138, 140, 142, 144, 146, or 148; or wherein the WUS/WOX homeobox polypeptide is encoded by a nucleotide sequence of any of SEQ ID NOS: 60, 62, 64, 66, 68, 70, 72, 74, 76, 78, 80, 82, 84, 86, 88, 90, 92, 94, 96, 98, 100, 102, 104, 106, 127, 129, 131, 133, 135, 137, 139, 141, 143, 145, or 147. Also provided are methods for producing a transgenic dicot plant or a transgenic gymnosperm plant, wherein the WUS/WOX homeobox polypeptide is encoded by a nucleotide that encodes a gene product involved in plant metabolism, organ development, stem cell development, cell growth stimulation, organogenesis, regeneration, somatic embryogenesis initiation, accelerated somatic embryo maturation, initiation and/or development of the apical meristem, initiation and/or development of shoot meristem, initiation and/or development of shoots, or a combination thereof.

[0039] Also provided are methods for producing a transgenic dicot plant or a transgenic gymnosperm plant, wherein the the WUS/WOX homeobox polypeptide is operably linked to a promoter selected from the group consisting of a constitutive promoter, an inducible promoter, a tissue-specific promoter, or a developmentally regulated promoter. Also provided are methods for producing a transgenic dicot plant or a transgenic gymnosperm plant, wherein the constitutive promoter, the inducible promoter, the tissue-specific promoter, or the developmentally regulated promoter is selected from the group consisting of UBI, LLDAV, EVCV, DMMV, BSV(AY) PRO, CYMV PRO FL, UBIZM PRO, SI-UB3 PRO, SB-UBI PRO (ALT1), USB1ZM PRO, ZM-GOS2 PRO, ZM-H1B PRO (1.2 KB), IN2-2, NOS, the −135 version of 35S, ZM-ADF PRO (ALT2), AXIG1, DR5, XVE, GLB1, OLE, LTP2, HSP17.7, HSP26, HSP18A, AT-HSP811, AT-HSP811L, GM-HSP173B, promoters activated by tetracycline, ethamethsulfuron or chlorsulfuron, PLTP, PLTP1, PLTP2, PLTP3, SDR, LGL, LEA-14A, LEA-D34, at least one of SEQ ID NOS: 1-59, 108-110, 124-126, 149-152, and 189, a nucleotide sequence that is at least 95% identical to at least one of SEQ ID NOS: 1-59, 108-110, 124-126, 149-152, and 189, a nucleotide sequence that is at least 70% identical to at least one of SEQ ID NOS: 1-59, 108-110, 124-126, 149-152, and 189, a fragment or variant of at least one of SEQ ID NOS: 1-59, 108-110, 124-126, 149-152, and 189, or at least a 100-bp fragment of at least one of SEQ ID NOS: 1-59, 108-110, 124-126, 149-152, and 189.

[0040] Also provided are methods for producing a transgenic dicot plant or a transgenic gymnosperm plant, wherein the heterologous polynucleotide of interest encodes a gene product conferring nutritional enhancement, increased yield, abiotic stress tolerance, drought tolerance, cold tolerance, herbicide tolerance, pest resistance, pathogen resistance, insect resistance, nitrogen use efficiency (NUE), disease resistance, or an ability to alter a metabolic pathway.

[0041] Also provided are methods for producing a a transgenic dicot plant or a transgenic gymnosperm plant, wherein the recombinant expression cassette further comprises a site-specific recombinase cassette comprising a nucleotide sequence encoding a site-specific recombinase selected from the group consisting of FLP, FLPe, KD, Cre, SSV1, lambda Int, phi C31 Int, HK022, R, B2, B3, Gin, Tn1721, CinH, ParA, Tn5053, Bxb1, TP907-1, or U153, wherein the site-specific recombinase is operably linked to a constitutive promoter, an inducible promoter, a tissue-specific promoter, or a developmentally regulated promoter. Also provided are methods for producing a transgenic dicot plant or a transgenic gymnosperm plant, wherein the constitutive promoter, the inducible promoter, the tissue-specific promoter, or the developmentally regulated promoter is selected from the group consisting of UBI, LLDAV, EVCV, DMMV, BSV(AY) PRO, CYMV PRO FL, UBIZM PRO, SI-UB3 PRO, SB-UBI PRO (ALT1), USB1ZM PRO, ZM-GOS2 PRO, ZM-H1B PRO (1.2 KB), IN2-2, NOS, the −135 version of 35S, ZM-ADF PRO (ALT2), AXIG1, DR5, XVE, GLB1, OLE, LTP2, HSP17.7, HSP26, HSP18A, AT-HSP811, AT-HSP811L, GM-HSP173B, promoters activated by tetracycline, ethamethsulfuron or chlorsulfuron, PLTP, PLTP1, PLTP2, PLTP3, SDR, LGL, LEA-14A, or LEA-D34.

[0042] Also provided are methods for producing a transgenic dicot plant or a transgenic gymnosperm plant, wherein the method further comprises excising the morphogenic gene cassett and the site-specific recombinase cassette from the recombinant expression cassette. Transgenic dicot plant or transgenic gymnosperm plant produced by the methods disclosed herein are also provided. Seed containing the trait gene cassette of the recombinant expression cassette produced from the transgenic dicot plants or the transgenic gymnosperm plants produced by the methods disclosed herein are also provided.

[0043] Also provided are methods for producing a transgenic dicot plant or a transgenic gymnosperm plant, wherein the morphogenic gene cassette comprises a first T-DNA and the trait gene cassette comprises a second T-DNA. Also provided are methods for producing a transgenic dicot plant or a transgenic gymnosperm plant, wherein the first T-DNA and the second T-DNA reside in the same bacterial strain for transforming the plant cell. Also provided are methods for producing a transgenic dicot plant or a transgenic gymnosperm plant, wherein the methods further comprise segregating the first T-DNA away from the second T-DNA. Transgenic dicot plants and transgenic gymnosperm plants so produced are also provided. Seed of the transgenic dicot plants and transgenic gymnosperm plants so produced, wherein the seed comprises the trait gene cassette of the recombinant expression cassette are also provided.

[0044] Also provided are methods for producing a transgenic dicot plant or a transgenic gymnosperm plant, wherein the first T-DNA resides in a first bacterial strain and the second T-DNA resides in a second bacterial strain and the first bacterial strain and the second bacterial strain are mixed in a ratio for transforming the plant cell. Also provided are methods for producing a transgenic dicot plant or a transgenic gymnosperm plant, wherein the methods further comprise segregating the first T-DNA away from the second T-DNA. Transgenic plants so produced are also provided. Seed of the transgenic dicot plants and transgenic gymnosperm plants so produced, wherein the seed comprises the trait gene cassette of the recombinant expression cassette are also provided.

[0045] Also provided are methods for producing a transgenic dicot plant or a transgenic gymnosperm plant, wherein germinating comprises transferring the somatic embryo or shoot to a maturation medium or germination medium and forming the transgenic dicot plant of the transgenic gymnosperm plant.

### DESCRIPTION OF THE FIGURES

[0046] FIG. 1 shows the median somatic embryo maturation efficiency of promoters GM-HBSTART2 (HBS2; SEQ ID NO:108), GM-HBSTART3 (HBS3; SEQ ID NO:1), GM-LTP3 (LTP3; SEQ ID NO:124), GM-MATE1 (MATE1; SEQ ID NO:109), GM-NED1 (NED1; SEQ ID NO:110) driving WUS expression (HBS2 (PHP80734; SEQ ID NO:113), HBS3 (PHP81343; SEQ ID NO:116), LTP3 (PHP80730; SEQ ID NO:112), MATE1 (PHP80736; SEQ ID NO:114) and NED1 (PHP81060; SEQ ID NO:115)) and the TAG-RFP control (no WUS gene) (PHP80728; SEQ ID NO:111).

[0047] FIG. 2A, FIG. 2B, and FIG. 2C pictures were taken under white light. FIG. 2D, FIG. 2E, and FIG. 2F pictures were taken under fluorescent light to show the transgenic events. FIG. 2A, FIG. 2B, FIG. 2C, FIG. 2D, FIG. 2E, and FIG. 2F pictures were taken at the same time (5-6 weeks after Agrobacterium-infection). The somatic embryos shown in FIG. 2A and FIG. 2D, the TAG-RFP control treatment (Control TAG-RFP; PHP80728; SEQ ID NO:111), are small and underdeveloped. The somatic embryos shown in FIG. 2B and FIG. 2E, the LTP3 PRO::WUS (PHP80730; SEQ ID NO:112) treatment are approximately 2-fold larger than those in the TAG-RFP control treatment. The somatic embryos shown in FIG. 2C and FIG. 2F, the HBS3 PRO::WUS (PHP81343; SEQ ID NO:116) treatment are approximately 5-fold larger than those in the TAG-RFP control treatment.

[0048] FIG. 3A and FIG. 3B illustrate normal development and seed set of GM-HBS3 PRO::WUS events.

### DETAILED DESCRIPTION

[0049] The disclosures herein will be described more fully hereinafter with reference to the accompanying drawings, in which some, but not all possible aspects are shown. Indeed, disclosures may be embodied in many different forms and should not be construed as limited to the aspects set forth herein; rather, these aspects are provided so that this disclosure will satisfy applicable legal requirements.

[0050] Many modifications and other aspects disclosed herein will come to mind to one skilled in the art to which the disclosed compositions and methods pertain having the benefit of the teachings presented in the following descriptions and the associated drawings. Therefore, it is to be understood that the disclosures are not to be limited to the specific aspects disclosed and that modifications and other aspects are intended to be included within the scope of the appended claims. Although specific terms are employed herein, they are used in a generic and descriptive sense only and not for purposes of limitation.

[0051] It is also to be understood that the terminology used herein is for the purpose of describing particular aspects only and is not intended to be limiting. As used in the specification and in the claims, the term “comprising” can include the aspect of “consisting of.” Unless defined otherwise, all technical and scientific terms used herein have the same meaning as commonly understood by one of ordinary skill in the art to which the disclosed compositions and methods belong. In this specification and in the claims which follow, reference will be made to a number of terms which shall be defined herein.

[0052] Regenerable plant structure is defined as a multicellular structure capable of forming a fully functional fertile plant, such as, but not limited to, shoot meristem, shoots, somatic embryos, embryogenic callus, somatic meristems, and/or organogenic callus.

[0053] Somatic embryo is defined as a multicellular structure that progresses through developmental stages that are similar to the development of a zygotic embryo, including formation of globular and transition-stage embryos, formation of an embryo axis and a scutellum, and accumulation of lipids and starch. Single somatic embryos derived from a zygotic embryo germinate to produce single non-chimeric plants, which may originally derive from a single-cell.

[0054] Embryogenic callus is defined as a friable or non-friable mixture of undifferentiated or partially undifferentiated cells which subtend proliferating primary and secondary somatic embryos capable of regenerating into mature fertile plants.

[0055] Somatic meristem is defined as a multicellular structure that is similar to the apical meristem which is part of a seed-derived embryo, characterized as having an undifferentiated apical dome flanked by leaf primorida and subtended by vascular initials, the apical dome giving rise to an above-ground vegetative plant. Such somatic meristems can form single or fused clusters of meristems.

[0056] Organogenic callus is defined as a compact mixture of differentiated growing plant structures, including but not limited to apical meristems, root meristems, leaves and roots.

[0057] Germination is the growth of a regenerable structure to form a plantlet which continues growing to produce a plant.

[0058] A transgenic plant is defined as a mature, fertile plant that contains a transgene.

[0059] The disclosure relates to compositions and methods drawn to a nucleic acid molecule comprising a tissue-preferred promoter operably linked to a morphogenic gene and methods of their use. The nucleic acid molecule compositions of the disclosure comprise nucleotide sequences for tissue-preferred promoters known as GM-HBSTART3 (SEQ ID NO: 1), GM-HBSTART3 (TRUNCATED) (SEQ ID NO: 2), AT-ML1 (SEQ ID NO: 3), GM-ML1-Like (SEQ ID NO: 4), GM-ML1-Like (TRUNCATED) (SEQ ID NO: 5), ZM-HBSTART3 (SEQ ID NO: 6), OS-HBSTART3 (SEQ ID NO: 7), AT-PDF1 P2 (SEQ ID NO: 8), GM-PDF1 (SEQ ID NO: 9), GM-PDF1 (TRUNCATED) (SEQ ID NO: 10), SB-PDF1 (SEQ ID NO: 11), OS-PDF1 (SEQ ID NO: 12), OS-PDF1 (TRUNCATED) (SEQ ID NO: 13), PT-PDF1 (SEQ ID NO: 14), PT-PDF1 (TRUNCATED) (SEQ ID NO: 15), SI-PDF1 (SEQ ID NO: 16), SI-PDF1 (TRUNCATED) (SEQ ID NO: 17), AT-PDF2 (SEQ ID NO: 18), GM-PDF2 (SEQ ID NO: 19), GM-PDF2 (TRUNCATED) (SEQ ID NO: 20), ZM-GL1 (SEQ ID NO: 21), AT-PDF2a (SEQ ID NO: 22), AT-PDF2a (TRUNCATED) (SEQ ID NO: 23), GM-PDF2a (SEQ ID NO: 24), GM-PDF2a (TRUNCATED) (SEQ ID NO: 25), OS-PDF2 (SEQ ID NO: 26), OS-PDF2 (TRUNCATED) (SEQ ID NO: 27), PT-PDF2 (SEQ ID NO: 28), PT-PDF2 (TRUNCATED) (SEQ ID NO: 29), VV-PDF2 (SEQ ID NO: 30), VV-PDF2 (TRUNCATED) (SEQ ID NO: 31), ZM-PDF2 (SEQ ID NO: 32), SI-PDF2 (SEQ ID NO: 33), SI-PDF2 (TRUNCATED) (SEQ ID NO: 34), VV-PDF2a (SEQ ID NO: 35), PT-PDF2a (SEQ ID NO: 36), PT-PDF2a (TRUNCATED) (SEQ ID NO: 37), MT-PDF2 (SEQ ID NO: 38), MT-PDF2 (TRUNCATED) (SEQ ID NO: 39), AT-HDG2 (SEQ ID NO: 40), GM-HDG2 (SEQ ID NO: 41), GM-HDG2 (TRUNCATED) (SEQ ID NO: 42), SB-HDG2 (SEQ ID NO: 43), SB-HDG2 (TRUNCATED) (SEQ ID NO: 44), AT-CER6 (SEQ ID NO: 45), AT-CER60 (SEQ ID NO: 46), AT-CER60 (TRUNCATED) (SEQ ID NO: 47), GM-CER6 (SEQ ID NO: 48), GM-CER6 (TRUNCATED) (SEQ ID NO: 49), PT-CER6 (SEQ ID NO: 50), PT-CER6 (TRUNCATED) (SEQ ID NO: 51), VV-CER6 (SEQ ID NO: 52), VV-CER6 (TRUNCATED) (SEQ ID NO: 53), SB-CER6 (SEQ ID NO: 54), ZM-CER6 (SEQ ID NO: 55), SI-CER6 (SEQ ID NO: 56), SI-CER6 (TRUNCATED) (SEQ ID NO: 57), OS-CER6 (SEQ ID NO: 58), OS-CER6 (TRUNCATED) (SEQ ID NO: 59), GM-HBSTART2 (SEQ ID NO: 108), GM-MATE1 (SEQ ID NO: 109), GM-NED1 (SEQ ID NO: 110), GM-LTP3 (SEQ ID NO:124), AT-ML1 (TRUNCATED) (SEQ ID NO: 125), AT-CER6 (TRUNCATED1) (SEQ ID NO: 126), AT-PDF1 (TRUNCATED) (SEQ ID NO: 149), AT-PDF2 (TRUNCATED) (SEQ ID NO: 150), AT-HDG2 (TRUNCATED) (SEQ ID NO: 151), AT-ANL2 (SEQ ID NO: 152), and AT-CER6 (TRUNCATED2) (SEQ ID NO: 189) operably linked to a morphogenic gene. The present disclosure provides for nucleic acid molecules comprising at least one of the nucleotide sequences set forth in SEQ ID NOS: 1-59, 108-110, 124-126, 149-152, and 189 and fragments and variants thereof operably linked to a morphogenic gene. The compositions further comprise expression cassettes, DNA constructs, and vectors comprising nucleic acid molecules comprising a nucleotide sequence of at least one of the nucleotide sequences set forth in SEQ ID NOS: 1-59, 108-110, 124-126, 149-152, and 189 operably linked to a morphogenic gene.

[0060] As used herein the term “tissue-preferred promoter disclosed herein” means a nucleotide sequence selected from the group consisting of at least one of SEQ ID NOS: 1-59, 108-110, 124-126, 149-152, and 189, wherein the nucleotide sequence initiates transcription in a plant cell; a nucleotide sequence that is at least 95% identical to at least one of SEQ ID NOS: 1-59, 108-110, 124-126, 149-152, and 189, wherein the nucleotide sequence initiates transcription in a plant cell; a nucleotide sequence having at least 70% identity to at least one of SEQ ID NOS: 1-59, 108-110, 124-126, 149-152, and 189, wherein the nucleotide sequence initiates transcription in a plant cell; a fragment or variant of the nucleotide sequence of at least one of SEQ ID NOS: 1-59, 108-110, 124-126, 149-152, and 189, wherein the fragment or variant initiates transcription in a plant cell; at least 100 contiguous nucleotides of a nucleotide sequence of at least one of SEQ ID NOS: 1-59, 108-110, 124-126, 149-152, and 189, wherein the at least 100 contiguous nucleotides of the nucleotide sequence initiates transcription in a plant cell; and at least a 100-bp fragment of the nucleotide sequence of at least one of SEQ ID NOS: 1-59, 108-110, 124-126, 149-152, and 189, wherein the at least a 100-bp fragment of the nucleotide sequence initiates transcription in a plant cell.

[0061] As used herein, the term “morphogenic gene” means a gene that when ectopically expressed stimulates formation of a somatically-derived structure that can produce a plant. More precisely, ectopic expression of the morphogenic gene stimulates the de novo formation of a somatic embryo or an organogenic structure, such as a shoot meristem, that can produce a plant. This stimulated de novo formation occurs either in the cell in which the morphogenic gene is expressed, or in a neighboring cell. A morphogenic gene can be a transcription factor that regulates expression of other genes, or a gene that influences hormone levels in a plant tissue, both of which can stimulate morphogenic changes. A morphogenic gene may be stably incorporated into the genome of a plant or it may be transiently expressed. A tissue-preferred promoter of the disclosure is used to express a morphogenic gene involved in plant metabolism, organ development, stem cell development, cell growth stimulation, organogenesis, regeneration, somatic embryogenesis initiation, accelerated somatic embryo maturation, initiation and/or development of the apical meristem, initiation and/or development of shoot meristem, initiation and/or development of shoots, or a combination thereof, such as WUS/WOX genes (WUS1, WUS2, WUS3, WOX2A, WOX4, WOX5, or WOX9) see U.S. Pat. Nos. 7,348,468 and 7,256,322 and United States Patent Application publications 20170121722 and 20070271628; Laux et al. (1996) Development 122:87-96; and Mayer et al. (1998) Cell 95:805-815; van der Graaff et al., 2009, Genome Biology 10:248; Dolzblasz et al., 2016, Mol. Plant 19:1028-39. Modulation of WUS/WOX is expected to modulate plant and/or plant tissue phenotype including plant metabolism, organ development, stem cell development, cell growth stimulation, organogenesis, regeneration, somatic embryogenesis initiation, accelerated somatic embryo maturation, initiation and/or development of the apical meristem, initiation and/or development of shoot meristem, initiation and/or development of shoots, or a combination thereof. Expression of Arabidopsis WUS can induce stem cells in vegetative tissues, which can differentiate into somatic embryos (Zuo, et al. (2002) Plant J 30:349-359). Also of interest in this regard would be a MYB118 gene (see U.S. Pat. No. 7,148,402), MYB115 gene (see Wang et al. (2008) Cell Research 224-235), a BABYBOOM gene (BBM; see Boutilier et al. (2002) Plant Cell 14:1737-1749), or a CLAVATA gene (see, for example, U.S. Pat. No. 7,179,963).

[0062] Morphogenic genes useful in the present disclosure include, but are not limited to, WUS/WOX genes known in the art as well as those disclosed herein. Morphogenic genes include but are not limited to the WUS/WOX genes disclosed herein including AT-WUS (SEQ ID NO: 60), LJ-W (SEQ ID NO: 62), GM-W (SEQ ID NO: 64), CS-WUS (SEQ ID NO: 66), CR-WUS (SEQ ID NO: 68), AA-WUS (SEQ ID NO: 70), RS-WUS (SEQ ID NO: 72), BN-WUS (SEQ ID NO: 74), BO-WU (SEQ ID NO: 76), HA-WUS (SEQ ID NO: 78), PT-WUS (SEQ ID NO: 80), VV-WUS (SEQ ID NO: 82), AT-WUS (soy optimized) (SEQ ID NO: 84), LJ-WUS (soy optimized) (SEQ ID NO: 86), MT-WUS (soy optimized) (SEQ ID NO: 88), PY-WUS (soy optimized) (SEQ ID NO: 90), PV-WUS (soy optimized) (SEQ ID NO: 92), ZM-WUS1 (SEQ ID NO: 94), ZM-WUS2 (SEQ ID NO: 96), ZM-WUS3 (SEQ ID NO: 98), ZM-WOX2A (SEQ ID NO: 100), ZM-WOX4 (SEQ ID NO: 102), ZM-WOX5A (SEQ ID NO: 104), ZM-WOX9 (SEQ ID NO: 106), GG-WUS (SEQ ID NO: 127), MD-WUS (SEQ ID NO: 129), ME-WUS (SEQ ID NO: 131), KF-WUS (SEQ ID NO: 133), GH-WUS (SEQ ID NO: 135), ZOSMA-WUS (SEQ ID NO: 137), AMBTR-WUS (SEQ ID NO: 139), AC-WUS (SEQ ID NO: 141), AH-WUS (SEQ ID NO: 143), CUCSA-WUS (SEQ ID NO: 145), and PINTA-WUS (SEQ ID NO: 147).

[0063] The WUS/WOX genes disclosed herein encode WUS/WOX homeobox polypeptides including AT-WUS (SEQ ID NO: 61), LJ-W (SEQ ID NO: 63), GM-W (SEQ ID NO: 65), CS-WUS (SEQ ID NO: 67), CR-WUS (SEQ ID NO: 69), AA-WUS (SEQ ID NO: 71), RS-WUS (SEQ ID NO: 73), BN-WUS (SEQ ID NO: 75), BO-WU (SEQ ID NO: 77), HA-WUS (SEQ ID NO: 79), PT-WUS (SEQ ID NO: 81), VV-WUS (SEQ ID NO: 83), AT-WUS (SEQ ID NO: 85), LJ-WUS (SEQ ID NO: 87), MT-WUS (SEQ ID NO: 89), PY-WUS (SEQ ID NO: 91), PV-WUS (SEQ ID NO: 93), ZM-WUS1 (SEQ ID NO: 95), ZM-WUS2 (SEQ ID NO: 97), ZM-WUS3 (SEQ ID NO: 99), ZM-WOX2A (SEQ ID NO: 101), ZM-WOX4 (SEQ ID NO: 103), ZM-WOX5A (SEQ ID NO: 105), ZM-WOX9 (SEQ ID NO: 107), GG-WUS (SEQ ID NO: 128), MD-WUS (SEQ ID NO: 130), ME-WUS (SEQ ID NO: 132), KF-WUS (SEQ ID NO: 134), GH-WUS (SEQ ID NO: 136), ZOSMA-WUS (SEQ ID NO: 138), AMBTR-WUS (SEQ ID NO: 130), AC-WUS (SEQ ID NO: 142), AH-WUS (SEQ ID NO: 144), CUCSA-WUS (SEQ ID NO: 146), and PINTA-WUS (SEQ ID NO: 148).

[0064] The WUS/WOX genes disclosed herein include those encoding a WUS/WOX homeobox polypeptide, wherein the WUS/WOX homeobox polypeptide comprises an amino acid sequence of any of SEQ ID NOS: 61, 63, 65, 67, 69, 71, 73, 75, 77, 79, 81, 83, 85, 87, 89, 91, 93, 95, 97, 99, 101, 103, 105, 107, 128, 130, 132, 134, 136, 138, 140, 142, 144, 146, or 148; or wherein the WUS/WOX homeobox polypeptide is encoded by a nucleotide sequence of any of SEQ ID NOS: 60, 62, 64, 66, 68, 70, 72, 74, 76, 78, 80, 82, 84, 86, 88, 90, 92, 94, 96, 98, 100, 102, 104, 106, 127, 129, 131, 133, 135, 137, 139, 141, 143, 145, or 147.

[0065] Other morphogenic genes useful in the present disclosure include, but are not limited to, LEC1 (Lotan et al., 1998, Cell 93:1195-1205), LEC2 (Stone et al., 2008, PNAS 105:3151-3156; Belide et al., 2013, Plant Cell Tiss. Organ Cult 113:543-553), KN1/STM (Sinha et al., 1993. Genes Dev 7:787-795), the IPT gene from Agrobacterium (Ebinuma and Komamine, 2001, In vitro Cell. Dev Biol-Plant 37:103-113), MONOPTEROS-DELTA (Ckurshumova et al., 2014, New Phytol. 204:556-566), the Agrobacterium AV-6b gene (Wabiko and Minemura 1996, Plant Physiol. 112:939-951), the combination of the Agrobacterium IAA-h and IAA-m genes (Endo et al., 2002, Plant Cell Rep., 20:923-928), the Arabidopsis SERK gene (Hecht et al., 2001, Plant Physiol. 127:803-816), the Arabiopsis AGL15 gene (Harding et al., 2003, Plant Physiol. 133:653-663).

[0066] As used herein, the term “transcription factor” means a protein that controls the rate of transcription of specific genes by binding to the DNA sequence of the promoter and either up-regulating or down-regulating expression. Examples of transcription factors, which are also morphogenic genes, include members of the AP2/EREBP family (including the BBM (ODP2), plethora and aintegumenta sub-families, CAAT-box binding proteins such as LEC1 and HAP3, and members of the MYB, bHLH, NAC, MADS, bZIP and WRKY families.

[0067] In an aspect, the recombinant expression cassette or construct comprises a nucleotide sequence encoding a WUS/WOX homeobox polypeptide. In various aspects, expression of a nucleotide sequence encoding a WUS/WOX homeobox occurs for from about 21 to about 28 days after initiation of transformation.

[0068] In an aspect, the nucleotide sequence encoding the WUS/WOX homeobox polypeptide can be targeted for excision by a site-specific recombinase. Thus, the expression of the nucleotide sequence encoding the WUS/WOX homeobox polypeptide can be controlled by excision at a desired time post-transformation. It is understood that when a site-specific recombinase is used to control the expression of the nucleotide sequence encoding the WUS/WOX homeobox polypeptide, the expression construct comprises appropriate site-specific excision sites flanking the polynucleotide sequences to be excised, e.g., Cre lox sites if Cre recombinase is utilized. It is not necessary that the site-specific recombinase be co-located on the expression construct comprising the nucleotide sequence encoding the WUS/WOX homeobox polypeptide. However, in an aspect, the expression construct further comprises a nucleotide sequence encoding a site-specific recombinase.

[0069] The site-specific recombinase used to control expression of the nucleotide sequence encoding the WUS/WOX homeobox polypeptide can be chosen from a variety of suitable site-specific recombinases. For examples, in various aspects, the site-specific recombinase is FLP, FLPe, KD, Cre, SSV1, lambda Int, phi C31 Int, HK022, R, B2 (Nern et al., (2011) PNAS Vol. 108, No. 34 pp 14198-14203), B3 (Nern et al., (2011) PNAS Vol. 108, No. 34 pp 14198-14203), Gin, Tn1721, CinH, ParA, Tn5053, Bxb1, TP907-1, or U153. The site-specific recombinase can be a destabilized fusion polypeptide. The destabilized fusion polypeptide can be TETR(G17A)˜CRE or ESR(G17A)˜CRE.

[0070] In an aspect, the nucleotide sequence encoding a site-specific recombinase is operably linked to a constitutive promoter, an inducible promoter, a tissue-specific promoter, or a developmentally-regulated promoter. Suitable constitutive promoters, inducible promoters, tissue-specific promoters, and developmentally-regulated promotersinclude UBI, LLDAV, EVCV, DMMV, BSV(AY) PRO, CYMV PRO FL, UBIZM PRO, SI-UB3 PRO, SB-UBI PRO (ALT1), USB1ZM PRO, ZM-GOS2 PRO, ZM-H1B PRO (1.2 KB), IN2-2, NOS, the −135 version of 35S, ZM-ADF PRO (ALT2), AXIG1, DR5, XVE, GLB1, OLE, LTP2 (Kalla et al., 1994. Plant J. 6:849-860 and U.S. Pat. No. 5,525,716), HSP17.7, HSP26, HSP18A, AT-HSP811, AT-HSP811L, GM-HSP173B, promoters activated by tetracycline, ethamethsulfuron or chlorsulfuron, PLTP, PLTP1, PLTP2, PLTP3, SDR, LGL, LEA-14A, or LEA-D34.

[0071] In an aspect, the chemically inducible promoter operably linked to the site-specific recombinase is XVE. The chemically-inducible promoter can be repressed by the tetraycline repressor (TETR), the ethametsulfuron repressor (ESR), or the chlorsulfuron repressor (CR), and de-repression occurs upon addition of tetracycline-related or sulfonylurea ligands. The repressor can be TETR and the tetracycline-related ligand is doxycycline or anhydrotetracycline. (Gatz, C., Frohberg, C. and Wendenburg, R. (1992) Stringent repression and homogeneous de-repression by tetracycline of a modified CaMV 35S promoter in intact transgenic tobacco plants, Plant J. 2, 397-404). Alternatively, the repressor can be ESR and the sulfonylurea ligand is ethametsulfuron, chlorsulfuron, metsulfuron-methyl, sulfometuron methyl, chlorimuron ethyl, nicosulfuron, primisulfuron, tribenuron, sulfosulfuron, trifloxysulfuron, foramsulfuron, iodosulfuron, prosulfuron, thifensulfuron, rimsulfuron, mesosulfuron, or halosulfuron (US20110287936 incorporated herein by reference in its entirety).

[0072] In an aspect, when the expression construct comprises site-specific recombinase excision sites, the nucleotide sequence encoding the WUS/WOX homeobox polypeptide can be operably linked to an auxin inducible promoter, a developmentally regulated promoter, a tissue-specific promoter, or a constitutive promoter. Exemplary auxin inducible promoters, developmentally regulated promoters, tissue-specific promoters, and constitutive promoters useful in this context include UBI, LLDAV, EVCV, DMMV, BSV(AY) PRO, CYMV PRO FL, UBIZM PRO, SI-UB3 PRO, SB-UBI PRO (ALT1), USB1ZM PRO, ZM-GOS2 PRO, ZM-H1B PRO (1.2 KB), IN2-2, NOS, the −135 version of 35S, ZM-ADF PRO (ALT2), AXIG1 (U.S. Pat. No. 6,838,593 incorporated herein by reference in its entirety), DR5, XVE, GLB1, OLE, LTP2, HSP17.7, HSP26, HSP18A, AT-HSP811 (Takahashi, T, et al., (1992) Plant Physiol. 99 (2): 383-390), AT-HSP811L (Takahashi, T, et al., (1992) Plant Physiol. 99 (2): 383-390), GM-HSP173B (Schöffl, F., et al. (1984) EMBO J. 3(11): 2491-2497), promoters activated by tetracycline, ethamethsulfuron or chlorsulfuron, PLTP, PLTP1, PLTP2, PLTP3, SDR, LGL, LEA-14A, LEA-D34, at least one of SEQ ID NOS: 1-59, 108-110, 124-126, 149-152, and 189, a nucleotide sequence that is at least 95% identical to at least one of SEQ ID NOS: 1-59, 108-110, 124-126, 149-152, and 189, a nucleotide sequence that is at least 70% identical to at least one of SEQ ID NOS: 1-59, 108-110, 124-126, 149-152, and 189, a fragment or variant of at least one of SEQ ID NOS: 1-59, 108-110, 124-126, 149-152, and 189, or at least a 100-bp fragment of at least one of SEQ ID NOS: 1-59, 108-110, 124-126, 149-152, and 189.

[0073] The appropriate duration for expression of the nucleotide sequence encoding a WUS/WOX homeobox polypeptide can be achieved by use of a tissue-preferred promter disclosed hereinincluding, but not limited to at least one of SEQ ID NOS: 1-59, 108-110, 124-126, 149-152, and 189, a nucleotide sequence that is at least 95% identical to at least one of SEQ ID NOS: 1-59, 108-110, 124-126, 149-152, and 189, a nucleotide sequence that is at least 70% identical to at least one of SEQ ID NOS: 1-59, 108-110, 124-126, 149-152, and 189, a fragment or variant of at least one of SEQ ID NOS: 1-59, 108-110, 124-126, 149-152, and 189, or at least a 100-bp fragment of at least one of SEQ ID NOS: 1-59, 108-110, 124-126, 149-152, and 189. When using a morphogenic gene cassette and a trait gene cassette to produce transgenic plants it is desirable to have the ability to segregate the morphogenic gene locus away from the trait gene locus in co-transformed plants to provide transgenic plants containing only the trait gene. This can be accomplished using an Agrobacterium tumefaciens two T-DNA binary system, with two variations on this general theme (see Miller et al., 2002). For example, in the first, a two T-DNA vector, where expression cassettes for morphogenic genes and herbicide selection (i.e. HRA) are contained within a first T-DNA and the trait gene cassette is contained within a second T-DNA, where both T-DNA's reside on a single binary vector. When a plant cell is transformed by an Agrobacterium containing the two T-DNA plasmid, a high percentage of transformed cells contain both T-DNA's that have integrated into different genomic locations (for example, onto different chromosomes). In the second method, for example, two Agrobacterium strains, each containing one of the two T-DNA's (either the morphogenic gene T-DNA or the trait gene T-DNA), are mixed together in a ratio, and the mixture is used for transformation. After transformation using this mixed Agrobacterium method, it is observed at a high frequency that recovered transgenic events contain both T-DNA's, often at separate genomic locations. For both co-transformation methods, it is observed that in a large proportion of the produced transgenic events, the two T-DNA loci segregate independently and progeny T1 plants can be readily identified in which the T-DNA loci have segregated away from each other, resulting in the recovery of progeny seed that contain the trait genes with no morphogenic genes/herbicide genes. See, Miller et al. Transgenic Res 11(4):381-96.

[0074] The methods provided herein rely upon the use of bacteria-mediated and/or biolistic-mediated gene transfer to produce regenerable plant cells having an incorporated nucleotide sequence of interest. Bacterial strains useful in the methods of the disclosure include, but are not limited to, a disarmed Agrobacteria, an Ochrobactrum bacteria or a Rhizobiaceae bacteria. In an aspect, the different bacterial strains are selected from (i) a disarmed Agrobacteria and an Ochrobactrum bacteria, (ii) a disarmed Agrobacteria and a Rhizobiaceae bacteria, and (iii) a Rhizobiaceae bacteria and an Ochrobactrum bacteria.

[0075] Disarmed Agrobacteria useful in the present methods include, but are not limited to, AGL-1, EHA105, GV3101, LBA4404, and LBA4404 THY-.

[0076] Ochrobactrum bacterial strains useful in the present methods include, but are not limited to, Ochrobactrum haywardense H1 NRRL Deposit B-67078, Ochrobactrum cytisi, Ochrobactrum daejeonense, Ochrobactrum oryzae, Ochrobactrum tritici LBNL124-A-10, HTG3-C-07, Ochrobactrum pecoris, Ochrobactrum ciceri, Ochrobactrum gallinifaecis, Ochrobactrum grignonense, Ochrobactrum guangzhouense, Ochrobactrum haematophilum, Ochrobactrum intermedium, Ochrobactrum lupini, Ochrobactrum pituitosum, Ochrobactrum pseudintermedium, Ochrobactrum pseudogrignonense, Ochrobactrum rhizosphaerae, Ochrobactrum thiophenivorans, and Ochrobactrum tritici.

[0077] Rhizobiaceae bacterial strains useful in the present methods include, but are not limited to, Rhizobium lusitanum, Rhizobium rhizogenes, Agrobacterium rubi, Rhizobium multihospitium, Rhizobium tropici, Rhizobium miluonense, Rhizobium leguminosarum, Rhizobium leguminosarum bv. trifolii, Rhizobium leguminosarum bv. phaseoli, Rhizobium leguminosarum. bv. viciae, Rhizobium leguminosarum Madison, Rhizobium leguminosarum USDA2370, Rhizobium leguminosarum USDA2408, Rhizobium leguminosarum USDA2668, Rhizobium leguminosarum 2370G, Rhizobium leguminosarum 2370LBA, Rhizobium leguminosarum 2048G, Rhizobium leguminosarum 2048LBA, Rhizobium leguminosarum bv. phaseoli 2668G, Rhizobium leguminosarum bv. phaseoli 2668LBA, Rhizobium leguminosarum RL542C, Rhizobium etli USDA 9032, Rhizobium etli bv. phaseoli, Rhizobium endophyticum, Rhizobium tibeticum, Rhizobium etli, Rhizobium pisi, Rhizobium phaseoli, Rhizobium fabae, Rhizobium hainanense, Arthrobacter viscosus, Rhizobium alamii, Rhizobium mesosinicum, Rhizobium sullae, Rhizobium indigoferae, Rhizobium gallicum, Rhizobium yanglingense, Rhizobium mongolense, Rhizobium oryzae, Rhizobium loessense, Rhizobium tubonense, Rhizobium cellulosilyticum, Rhizobium soli, Neorhizobium galegae, Neorhizobium vignae, Neorhizobium huautlense, Neorhizobium alkalisoli, Aureimonas altamirensis, Aureimonas frigidaquae, Aureimonas ureilytica. Aurantimonas coralicida, Fulvimarina pelagi, Martelella mediterranea, Allorhizobium undicola, Allorhizobium vitis, Allorhizobium borbor, Beijerinckia fluminensis, Agrobacterium larrymoorei, Agrobacterium radiobacter, Rhizobium selenitireducens corrig. Rhizobium rosettiformans, Rhizobium daejeonense, Rhizobium aggregatum, Pararhizobium capsulatum, Pararhizobium giardinii, Ensifer mexicanus, Ensifer terangae, Ensifer saheli, Ensifer kostiensis, Ensifer kummerowiae, Ensifer fredii, Sinorhizobium americanum, Ensifer arboris, Ensifer garamanticus, Ensifer meliloti, Ensifer numidicus, Ensifer adhaerens, Sinorhizobium sp., Sinorhizobium meliloti SD630, Sinorhizobium meliloti USDA1002, Sinorhizobium fredii USDA205, Sinorhizobium fredii SF542G, Sinorhizobium fredii SF4404, and Sinorhizobium fredii SM542C. See U.S. Pat. No. 9,365,859 incorporated herin by reference in its entirety.

[0078] In an aspect, the first bacterial strain and the second bacterial strain are present in a 50:50 ratio. In an aspect, the first bacterial strain and the second bacterial strain are present in a 25:75 ratio. In an aspect, the first bacterial strain and the second bacterial strain are present in a 10:90 ratio. In an aspect, the first bacterial strain and the second bacterial strain are present in a 5:95 ratio. In an aspect, the first bacterial strain and the second bacterial strain are present in a 1:99 ratio. In an aspect, the first bacterial strain and the second bacterial strain are different bacterial strains.

[0079] The promoters of the present disclosure include nucleotide sequences that allow initiation of transcription in a plant. In specific aspects, the promoters allow initiation of transcription in a tissue-preferred manner. Constructs of the disclosure comprise a tissue-preferred promoter disclosed herein operably linked to a morphogenic gene.

[0080] The tissue-preferred promoters disclosed herein also find use in the construction of expression cassettes or vectors for subsequent expression of a heterologous polynucleotide or a polynucleotide of interest in a plant of interest or as probes for the isolation of other promoters. The present disclosure provides for isolated DNA constructs comprising the promoter nucleotide sequences set forth in at least one of SEQ ID NOS: 1-59, 108-110, 124-126, 149-152, and 189 operably linked to morphogenic gene and optionally further comprising a heterologous polynucleotide or polynucleotide of interest.

[0081] Aspects of the disclosure include a nucleic acid molecule comprising a promoter having a nucleotide sequence selected from the group consisting of: at least one of SEQ ID NOS: 1-59, 108-110, 124-126, 149-152, and 189, wherein the nucleotide sequence initiates transcription in a plant cell; a nucleotide sequence that is at least 95% identical to at least one of SEQ ID NOS: 1-59, 108-110, 124-126, 149-152, and 189, wherein the nucleotide sequence initiates transcription in a plant cell; a nucleotide sequence having at least 70% identity to at least one of SEQ ID NOS: 1-59, 108-110, 124-126, 149-152, and 189, wherein the nucleotide sequence initiates transcription in a plant cell; a fragment or variant of the nucleotide sequence of at least one of SEQ ID NOS: 1-59, 108-110, 124-126, 149-152, and 189, wherein the fragment or variant initiates transcription in a plant cell; at least 100 contiguous nucleotides of a nucleotide sequence of at least one of SEQ ID NOS: 1-59, 108-110, 124-126, 149-152, and 189, wherein the at least 100 contiguous nucleotides of the nucleotide sequence initiates transcription in a plant cell; and at least a 100-bp fragment of the nucleotide sequence of at least one of SEQ ID NOS: 1-59, 108-110, 124-126, 149-152, and 189, wherein the at least a 100-bp fragment of the nucleotide sequence initiates transcription in a plant cell; wherein the promoter is operably linked to a morphogenic gene and optionally further comprising a heterologous polynucleotide or a polynucleotide of interest. Also embodied is an expression cassette comprising the promoter containing the nucleic acid, a vector comprising the expression cassette, and a plant cell comprising the expression cassette. Further aspects include a plant cell or plant wherein the expression cassette is transiently expressed or stably integrated into the genome of the plant cell or plant, whether monocot or dicot plant cells or plants, and a plant comprising the described expression cassette, whether monocot or dicot plant, the monocot or dicot plant cell or plant including maize, alfalfa, sorghum, rice, millet, soybean, wheat, cotton, sunflower, barley, oats, rye, flax, sugarcane, banana, cassava, common bean, cowpea, tomato, potato, beet, grape, Eucalyptus, poplar, pine, douglas fir, citrus, papaya, cacao, cucumber, apple, Capsicum, bamboo, Triticale, melon, and Brassica.

[0082] Also embodied is a plant with the described expression cassette stably incorporated into the genome of the plant, a seed of the plant, wherein the seed comprises the expression cassette. Further embodied is a plant wherein a gene or gene product of a heterologous polynucleotide or a polynucleotide of interest confers nutritional enhancement, increased yield, abiotic stress tolerance, drought tolerance, cold tolerance, herbicide tolerance, pest resistance, pathogen resistance, insect resistance, nitrogen use efficiency (NUE), disease resistance, or an ability to alter a metabolic pathway. A plant wherein expression of a heterologous polynucleotide or a polynucleotide of interest alters the phenotype of said plant is also embodied. Also embodied is an expression cassette comprising a recombinant polynucleotide comprising a functional fragment having promoter activity, wherein the fragment is derived from a nucleotide sequence selected from the group consisting of SEQ ID NOS: 1-59, 108-110, 124-126, 149-152, and 189, wherein the functional fragment having promoter activity is operably linked to a morphogenic gene.

[0083] The disclosure encompasses isolated or substantially purified nucleic acid compositions. An “isolated” or “purified” nucleic acid molecule or biologically active portion thereof is substantially free of other cellular material or culture medium when produced by recombinant techniques or substantially free of chemical precursors or other chemicals when chemically synthesized. An “isolated” nucleic acid is substantially free of sequences (including protein encoding sequences) that naturally flank the nucleic acid (i.e., sequences located at the 5′ and 3′ ends of the nucleic acid) in the genomic DNA of the organism from which the nucleic acid is derived. For example, in various aspects, the isolated nucleic acid molecule can contain less than about 5 kb, 4 kb, 3 kb, 2 kb, 1 kb, 0.5 kb or 0.1 kb of nucleotide sequences that naturally flank the nucleic acid molecule in genomic DNA of the cell from which the nucleic acid is derived. The sequences of the disclosure may be isolated from the 5′ untranslated region flanking their respective transcription initiation sites.

[0084] Fragments and variants of the disclosed promoter nucleotide sequences are also encompassed by the present disclosure. Fragments and variants of the promoter sequences of at least one of SEQ ID NOS: 1-59, 108-110, 124-126, 149-152, and 189 may be used in the DNA constructs of the disclosure. As used herein, the term “fragment” refers to a portion of the nucleic acid sequence. Fragments of promoter sequences retain the biological activity of initiating transcription, such as driving transcription in a constitutive manner. Alternatively, fragments of a nucleotide sequence that are useful as hybridization probes may not necessarily retain biological activity. Fragments of a nucleotide sequence for the promoters disclosed herein may range from at least about 20, 25, 50, 75, 100, 125, 150, 175, 200, 225, 250, 275, 300, 325, 350, 375, 400, 425, 450, 475, 500, 525, 550, 575, 600, 625, 650, 675, 700, 725, 750, 775, 800, 825, 850, 875, 900, 925, 950, 975, 1000, 1025, 1050, 1075, 1100, 1125, 1150, 1175, 1200, 1225, 1250, 1275, 1300, 1325, 1350, 1375, 1400, 1425, 1450, 1475, 1500, 1525, 1550, 1575, 1600, 1625, 1650, 1675, 1700, 1725, 1750, 1775, 1800, 1825, 1850, 1875, 1900, 1925, 1950, 1975, 2000, 2025, 2050, 2075, 2100, 2125, 2150, 2175, 2200, 2225, 2250, 2275, 2300, 2325, 2350, 2375, 2400, 2425, 2450, 2475, 2500, 2525, 2550, 2575, 2600, 2625, 2650, 2675, 2700, 2725, 2750, 2775, 2800, 2825, 2850, 2875, 2900, 2925, 2950, 2975, 3000, 3025, 3050, 3075, 3100, 3125, 3150, 3175, 3200, 3225, 3250, 3275, 3300, 3325, 3350, 3375, 3400, 3425, 3450, 3475, 3500, 3525, 3550, 3575, 3600, 3625, 3650, 3675, 3700, 3725, 3750, 3775, 3800, 3825, 3850, 3875, 3900, 3925, 3950, 3975, 4000, 4025, 4050, 4075, 4100, 4125, 4150, 4175, 4200, 4225, 4250, 4275, 4300, 4325, 4350, 4375, 4400, 4425, 4450, 4475, 4500, 4525, 4550, 4575, 4600, 4625, 4650, 4675, 4700, 4725, 4750, 4775, 4800, 4825, 4850, 4875, 4900, 4925, 4950, 4975, 5000, 5025, 5050, 5075, 5100, 5125, 5150, 5175, 5200, 5225, 5250, 5275, 5300, 5325, 5350, 5375, 5400, 5425, 5450, 5475, 5500, 5525, 5550, 5575, 5600, 5625, 5650, 5675, 5700, 5725, 5750, 5775, 5800, 5825, 5850, 5875, 5900, 5925, 5950, 5975, 6000, 6025, 6050, 6075, 6100, 6125, 6150, 6175, 6200, or 6225 nucleotides, and up to the full length of at least one of SEQ ID NOS: 1-59, 108-110, 124-126, 149-152, and 189. A biologically active portion of a promoter can be prepared by isolating a portion of the promoter sequences of the disclosure, and assessing the transcription activity of the portion.

[0085] As used herein, the term “variants” is means sequences having substantial similarity with a promoter sequence disclosed herein. A variant comprises a deletion and/or addition of one or more nucleotides at one or more internal sites within the native polynucleotide and/or a substitution of one or more nucleotides at one or more sites in the native polynucleotide. As used herein, a “native” nucleotide sequence comprises a naturally occurring nucleotide sequence. For nucleotide sequences, naturally occurring variants can be identified with the use of well-known molecular biology techniques, such as, for example, with polymerase chain reaction (PCR) and hybridization techniques as outlined herein.

[0086] Variant nucleotide sequences also include synthetically derived nucleotide sequences, such as those generated, for example, by using site-directed mutagenesis. Generally, variants of a nucleotide sequence disclosed herein will have at least 40%, 50%, 60%, 65%, 70%, 75%, 80%, 85%, 90%, 91%, 92%, 93%, 94%, to 95%, 96%, 97%, 98%, 99% or more sequence identity to that nucleotide sequence as determined by sequence alignment programs described elsewhere herein using default parameters. Biologically active variants of a nucleotide sequence disclosed herein are also encompassed. Biologically active variants include, for example, the native promoter sequences of a nucleotide sequence disclosed herein having one or more nucleotide substitutions, deletions or insertions. Promoter activity may be measured by using techniques such as Northern blot analysis, reporter activity measurements taken from transcriptional fusions, and the like. See, for example, Sambrook, et al., (1989) Molecular Cloning: A Laboratory Manual (2d ed., Cold Spring Harbor Laboratory Press, Cold Spring Harbor, N.Y.), hereinafter “Sambrook,” herein incorporated by reference in its entirety. Alternatively, levels of a reporter gene such as green fluorescent protein (GFP) or yellow fluorescent protein (YFP) or the like produced under the control of a promoter fragment or variant can be measured. See, for example, Matz et al. (1999) Nature Biotechnology 17:969-973; U.S. Pat. No. 6,072,050, herein incorporated by reference in its entirety; Nagai, et al., (2002) Nature Biotechnology 20(1):87-90. Variant nucleotide sequences also encompass sequences derived from a mutagenic and recombinogenic procedure such as DNA shuffling. With such a procedure, one or more different nucleotide sequences for the promoter can be manipulated to create a new promoter. In this manner, libraries of recombinant polynucleotides are generated from a population of related sequence polynucleotides comprising sequence regions that have substantial sequence identity and can be homologously recombined in vitro or in vivo. Strategies for such DNA shuffling are known in the art. See, for example, Stemmer, (1994) Proc. Natl. Acad. Sci. USA 91:10747-10751; Stemmer, (1994) Nature 370:389 391; Crameri, et al., (1997) Nature Biotech. 15:436-438; Moore, et al., (1997)J Mol. Biol. 272:336-347; Zhang, et al., (1997) Proc. Natl. Acad. Sci. USA 94:4504-4509; Crameri, et al., (1998) Nature 391:288-291 and U.S. Pat. Nos. 5,605,793 and 5,837,458, herein incorporated by reference in their entirety.

[0087] Methods for mutagenesis and nucleotide sequence alterations are well known in the art. See, for example, Kunkel, (1985) Proc. Natl. Acad. Sci. USA 82:488-492; Kunkel, et al., (1987) Methods in Enzymol. 154:367-382; U.S. Pat. No. 4,873,192; Walker and Gaastra, eds. (1983) Techniques in Molecular Biology (MacMillan Publishing Company, New York) and the references cited therein, herein incorporated by reference in their entirety.

[0088] The nucleotide sequences of the disclosure can be used to isolate corresponding sequences from other organisms, particularly other plants, more particularly other monocots or dicots. In this manner, methods such as PCR, hybridization and the like can be used to identify such sequences based on their sequence homology to the sequences set forth herein. Sequences isolated based on their sequence identity to the entire sequences set forth herein or to fragments thereof are encompassed by the present disclosure.

[0089] In a PCR approach, oligonucleotide primers can be designed for use in PCR reactions to amplify corresponding DNA sequences from cDNA or genomic DNA extracted from any plant of interest. Methods for designing PCR primers and PCR cloning are generally known in the art and are disclosed in, Sambrook, supra. See also, Innis, et al., eds. (1990) PCR Protocols: A Guide to Methods and Applications (Academic Press, New York); Innis and Gelfand, eds. (1995) PCR Strategies (Academic Press, New York); and Innis and Gelfand, eds. (1999) PCR Methods Manual (Academic Press, New York), herein incorporated by reference in their entirety. Known methods of PCR include, but are not limited to, methods using paired primers, nested primers, single specific primers, degenerate primers, gene-specific primers, vector-specific primers, partially-mismatched primers and the like.

[0090] In hybridization techniques, all or part of a known nucleotide sequence is used as a probe that selectively hybridizes to other corresponding nucleotide sequences present in a population of cloned genomic DNA fragments or cDNA fragments (i.e., genomic or cDNA libraries) from a chosen organism. The hybridization probes may be genomic DNA fragments, cDNA fragments, RNA fragments, or other oligonucleotides and may be labeled with a detectable group such as ³²P or any other detectable marker. Thus, for example, probes for hybridization can be made by labeling synthetic oligonucleotides based on the promoters of the disclosure. Methods for preparation of probes for hybridization and for construction of genomic libraries are generally known in the art and are disclosed in Sambrook, supra.

[0091] For example, an entire promoter sequence disclosed herein, or one or more portions thereof, may be used as a probe capable of specifically hybridizing to corresponding promoter sequences and messenger RNAs. To achieve specific hybridization under a variety of conditions, such probes include sequences that are unique among promoter sequences and are generally at least about 10 nucleotides in length or at least about 20 nucleotides in length. Such probes may be used to amplify corresponding promoter sequences from a chosen plant by PCR. This technique may be used to isolate additional coding sequences from a desired organism or as a diagnostic assay to determine the presence of coding sequences in an organism. Hybridization techniques include hybridization screening of plated DNA libraries (either plaques or colonies, see, for example, Sambrook, supra).

[0092] Hybridization of such sequences may be carried out under stringent conditions. The terms “stringent conditions” or “stringent hybridization conditions” are intended to mean conditions under which a probe will hybridize to its target sequence to a detectably greater degree than to other sequences (e.g., at least 2-fold over background). Stringent conditions are sequence-dependent and will be different in different circumstances. By controlling the stringency of the hybridization and/or washing conditions, target sequences that are 100% complementary to the probe can be identified (homologous probing). Alternatively, stringency conditions can be adjusted to allow some mismatching in sequences so that lower degrees of similarity are detected (heterologous probing). Generally, a probe is less than about 1000 nucleotides in length, optimally less than 500 nucleotides in length.

[0093] Typically, stringent conditions will be those in which the salt concentration is less than about 1.5 M Na ion, typically about 0.01 to 1.0 M Na ion concentration (or other salts) at pH 7.0 to 8.3 and the temperature is at least about 30° C. for short probes (e.g., 10 to 50 nucleotides) and at least about 60° C. for long probes (e.g., greater than 50 nucleotides). Stringent conditions may also be achieved with the addition of destabilizing agents such as formamide. Exemplary low stringency conditions include hybridization with a buffer solution of 30 to 35% formamide, 1 M NaCl, 1% SDS (sodium dodecyl sulphate) at 37° C. and a wash in 1 times to 2 times SSC (20 times SSC=3.0 M NaCl/0.3 M trisodium citrate) at 50 to 55° C. Exemplary moderate stringency conditions include hybridization in 40 to 45% formamide, 1.0 M NaCl, 1% SDS at 37° C. and a wash in 0.5 times to 1 times SSC at 55 to 60° C. Exemplary high stringency conditions include hybridization in 50% formamide, 1 M NaCl, 1% SDS at 37° C., and a final wash in 0.1 times SSC at 60 to 65° C. for a duration of at least 30 minutes. Duration of hybridization is generally less than about 24 hours, usually about 4 to about 12 hours. The duration of the wash time will be at least a length of time sufficient to reach equilibrium.

[0094] Specificity is typically the function of post-hybridization washes, the critical factors being the ionic strength and temperature of the final wash solution. For DNA-DNA hybrids, the thermal melting point (Tₘ) can be approximated from the equation of Meinkoth and Wahl, (1984) Anal. Biochem 138:267 284: Tₘ=81.5° C.+16.6 (log M)+0.41 (% GC)−0.61 (% form)−500/L; where M is the molarity of monovalent cations, % GC is the percentage of guanosine and cytosine nucleotides in the DNA, % form is the percentage of formamide in the hybridization solution, and L is the length of the hybrid in base pairs. The Tₘ is the temperature (under defined ionic strength and pH) at which 50% of a complementary target sequence hybridizes to a perfectly matched probe. Tₘ is reduced by about 1° C. for each 1% of mismatching, thus, Tₘ, hybridization, and/or wash conditions can be adjusted to hybridize to sequences of the desired identity. For example, if sequences with 90% identity are sought, the Tₘ can be decreased 10° C. Generally, stringent conditions are selected to be about 5° C. lower than the Tₘ for the specific sequence and its complement at a defined ionic strength and pH. However, severely stringent conditions can utilize a hybridization and/or wash at 1, 2, 3 or 4° C. lower than the Tₘ; moderately stringent conditions can utilize a hybridization and/or wash at 6, 7, 8, 9 or 10° C. lower than the Tₘ; low stringency conditions can utilize a hybridization and/or wash at 11, 12, 13, 14, 15 or 20° C. lower than the Tₘ. Using the equation, hybridization and wash compositions, and desired Tₘ, those of ordinary skill will understand that variations in the stringency of hybridization and/or wash solutions are inherently described. If the desired degree of mismatching results in a Tₘ of less than 45° C. (aqueous solution) or 32° C. (formamide solution), it is preferred to increase the SSC concentration so that a higher temperature can be used. An extensive guide to the hybridization of nucleic acids is found in Tijssen, (1993) Laboratory Techniques in Biochemistry and Molecular Biology—Hybridization with Nucleic Acid Probes, Part I, Chapter 2 (Elsevier, New York); and Ausubel, et al., eds. (1995) Current Protocols in Molecular Biology, Chapter 2 (Greene Publishing and Wiley-Interscience, New York), herein incorporated by reference in their entirety. See also, Sambrook supra. Thus, isolated sequences that have promoter activity and which hybridize under stringent conditions to the promoter sequences disclosed herein or to fragments thereof, are encompassed by the present disclosure.

[0095] In general, sequences that have promoter activity and hybridize to the promoter sequences disclosed herein will be at least 40% to 50% homologous, about 60%, 70%, 80%, 85%, 90%, 95% to 98% homologous or more with the disclosed sequences. That is, the sequence similarity of sequences may range, sharing at least about 40% to 50%, about 60% to 70%, and about 80%, 85%, 90%, 95% to 98% sequence similarity.

[0096] The following terms are used to describe the sequence relationships between two or more nucleic acids or polynucleotides: (a) “reference sequence”, (b) “comparison window”, (c) “sequence identity”, (d) “percentage of sequence identity” and (e) “substantial identity”.

[0097] As used herein, “reference sequence” is a defined sequence used as a basis for sequence comparison. A reference sequence may be a subset or the entirety of a specified sequence; for example, as a segment of a full-length cDNA or gene sequence or the complete cDNA or gene sequence.

[0098] As used herein, “comparison window” refers to a contiguous and specified segment of a polynucleotide sequence, wherein the polynucleotide sequence in the comparison window may comprise additions or deletions (i.e., gaps) compared to the reference sequence (which does not comprise additions or deletions) for optimal alignment of the two sequences. Generally, the comparison window is at least 20 contiguous nucleotides in length, and optionally can be 30, 40, 50, 100 or longer. Those of skill in the art understand that to avoid a high similarity to a reference sequence due to inclusion of gaps in the polynucleotide sequence, a gap penalty is typically introduced and is subtracted from the number of matches.

[0099] Methods of alignment of sequences for comparison are well known in the art. Thus, the determination of percent sequence identity between any two sequences can be accomplished using a mathematical algorithm. Non-limiting examples of such mathematical algorithms are the algorithm of Myers and Miller, (1988) CABIOS 4:11-17; the algorithm of Smith, et al., (1981) Adv. Appl. Math. 2:482; the algorithm of Needleman and Wunsch, (1970) J. Mol. Biol. 48:443-453; the algorithm of Pearson and Lipman, (1988) Proc. Natl. Acad. Sci. 85:2444-2448; the algorithm of Karlin and Altschul, (1990) Proc. Natl. Acad. Sci. USA 872:264, modified as in Karlin and Altschul, (1993) Proc. Natl. Acad. Sci. USA 90:5873-5877, herein incorporated by reference in their entirety.

[0100] Computer implementations of these mathematical algorithms can be utilized for comparison of sequences to determine sequence identity. Such implementations include, but are not limited to: CLUSTAL in the PC/Gene program (available from Intelligenetics, Mountain View, Calif.); the ALIGN program (Version 2.0) and GAP, BESTFIT, BLAST, FASTA and TFASTA in the GCG Wisconsin Genetics Software Package®, Version 10 (available from Accelrys Inc., 9685 Scranton Road, San Diego, Calif., USA). Alignments using these programs can be performed using the default parameters. The CLUSTAL program is well described by Higgins, et al., (1988) Gene 73:237-244; Higgins, et al., (1989) CABIOS 5:151-153; Corpet, et al., (1988) Nucleic Acids Res. 16:10881-90; Huang, et al., (1992) CABIOS 8:155-65; and Pearson, et al., (1994) Meth. Mol. Biol. 24:307-331, herein incorporated by reference in their entirety. The ALIGN program is based on the algorithm of Myers and Miller, (1988) supra. A PAM120 weight residue table, a gap length penalty of 12, and a gap penalty of 4 can be used with the ALIGN program when comparing amino acid sequences. The BLAST programs of Altschul, et al., (1990) J. Mol. Biol. 215:403, herein incorporated by reference in its entirety, are based on the algorithm of Karlin and Altschul, (1990) supra. BLAST nucleotide searches can be performed with the BLASTN program, score=100, word length=12, to obtain nucleotide sequences homologous to a nucleotide sequence encoding a protein of the disclosure. BLAST protein searches can be performed with the BLASTX program, score=50, word length=3, to obtain amino acid sequences homologous to a protein or polypeptide of the disclosure. To obtain gapped alignments for comparison purposes, Gapped BLAST (in BLAST 2.0) can be utilized as described in Altschul, et al., (1997) Nucleic Acids Res. 25:3389, herein incorporated by reference in its entirety. Alternatively, PSI-BLAST (in BLAST 2.0) can be used to perform an iterated search that detects distant relationships between molecules. See, Altschul, et al., (1997) supra. When utilizing BLAST, Gapped BLAST, PSI-BLAST, the default parameters of the respective programs (e.g., BLASTN for nucleotide sequences, BLASTX for proteins) can be used. See, the web site for the National Center for Biotechnology Information on the World Wide Web at ncbi.nlm.nih.gov. Alignment may also be performed manually by inspection.

[0101] Unless otherwise stated, sequence identity/similarity values provided herein refer to the value obtained using GAP Version 10 using the following parameters: % identity and % similarity for a nucleotide sequence using GAP Weight of 50 and Length Weight of 3, and the nwsgapdna.cmp scoring matrix; % identity and % similarity for an amino acid sequence using GAP Weight of 8 and Length Weight of 2, and the BLOSUM62 scoring matrix; or any equivalent program thereof. As used herein, “equivalent program” is any sequence comparison program that, for any two sequences in question, generates an alignment having identical nucleotide or amino acid residue matches and an identical percent sequence identity when compared to the corresponding alignment generated by GAP Version 10.

[0102] The GAP program uses the algorithm of Needleman and Wunsch, supra, to find the alignment of two complete sequences that maximizes the number of matches and minimizes the number of gaps. GAP considers all possible alignments and gap positions and creates the alignment with the largest number of matched bases and the fewest gaps. It allows for the provision of a gap creation penalty and a gap extension penalty in units of matched bases. GAP must make a profit of gap creation penalty number of matches for each gap it inserts. If a gap extension penalty greater than zero is chosen, GAP must, in addition, make a profit for each gap inserted of the length of the gap times the gap extension penalty. Default gap creation penalty values and gap extension penalty values in Version 10 of the GCG Wisconsin Genetics Software Package® for protein sequences are 8 and 2, respectively. For nucleotide sequences the default gap creation penalty is 50 while the default gap extension penalty is 3. The gap creation and gap extension penalties can be expressed as an integer selected from the group of integers consisting of from 0 to 200. Thus, for example, the gap creation and gap extension penalties can be 0, 1, 2, 3, 4, 5, 6, 7, 8, 9, 10, 15, 20, 25, 30, 35, 40, 45, 50, 55, 60, 65 or greater.

[0103] GAP presents one member of the family of best alignments. There may be many members of this family, but no other member has a better quality. GAP displays four figures of merit for alignments: Quality, Ratio, Identity and Similarity. The Quality is the metric maximized in order to align the sequences. Ratio is the Quality divided by the number of bases in the shorter segment. Percent Identity is the percent of the symbols that actually match. Percent Similarity is the percent of the symbols that are similar. Symbols that are across from gaps are ignored. A similarity is scored when the scoring matrix value for a pair of symbols is greater than or equal to 0.50, the similarity threshold. The scoring matrix used in Version 10 of the GCG Wisconsin Genetics Software Package® is BLOSUM62 (see, Henikoff and Henikoff, (1989) Proc. Natl. Acad. Sci. USA 89:10915, herein incorporated by reference in its entirety).

[0104] As used herein, “sequence identity” or “identity” in the context of two nucleic acid or polypeptide sequences refers to the residues in the two sequences that are the same when aligned for maximum correspondence over a specified comparison window. When percentage of sequence identity is used in reference to proteins it is recognized that residue positions which are not identical often differ by conservative amino acid substitutions, where amino acid residues are substituted for other amino acid residues with similar chemical properties (e.g., charge or hydrophobicity) and therefore do not change the functional properties of the molecule. When sequences differ in conservative substitutions, the percent sequence identity may be adjusted upwards to correct for the conservative nature of the substitution. Sequences that differ by such conservative substitutions are said to have “sequence similarity” or “similarity”. Means for making this adjustment are well known to those of skill in the art. Typically, this involves scoring a conservative substitution as a partial rather than a full mismatch, thereby increasing the percentage sequence identity. Thus, for example, where an identical amino acid is given a score of one and a non-conservative substitution is given a score of zero, a conservative substitution is given a score between zero and one. The scoring of conservative substitutions is calculated, e.g., as implemented in the program PC/GENE (Intelligenetics, Mountain View, Calif.).

[0105] As used herein, “percentage of sequence identity” means the value determined by comparing two optimally aligned sequences over a comparison window, wherein the portion of the polynucleotide sequence in the comparison window may comprise additions or deletions (i.e., gaps) as compared to the reference sequence (which does not comprise additions or deletions) for optimal alignment of the two sequences. The percentage is calculated by determining the number of positions at which the identical nucleic acid base or amino acid residue occurs in both sequences to yield the number of matched positions, dividing the number of matched positions by the total number of positions in the window of comparison, and multiplying the result by 100 to yield the percentage of sequence identity.

[0106] The term “substantial identity” of polynucleotide sequences means that a polynucleotide comprises a sequence that has at least 70% sequence identity, optimally at least 80%, more optimally at least 90% and most optimally at least 95%, compared to a reference sequence using an alignment program using standard parameters. One of skill in the art will recognize that these values can be appropriately adjusted to determine corresponding identity of proteins encoded by two nucleotide sequences by considering codon degeneracy, amino acid similarity, reading frame positioning and the like. Substantial identity of amino acid sequences for these purposes normally means sequence identity of at least 60%, 70%, 80%, 90% and at least 95%.

[0107] Another indication that nucleotide sequences are substantially identical is if two molecules hybridize to each other under stringent conditions. Generally, stringent conditions are selected to be about 5° C. lower than the Tₘ for the specific sequence at a defined ionic strength and pH. However, stringent conditions encompass temperatures in the range of about 1° C. to about 20° C. lower than the Tₘ, depending upon the desired degree of stringency as otherwise qualified herein. Nucleic acids that do not hybridize to each other under stringent conditions are still substantially identical if the polypeptides they encode are substantially identical. This may occur, e.g., when a copy of a nucleic acid is created using the maximum codon degeneracy permitted by the genetic code. One indication that two nucleic acid sequences are substantially identical is when the polypeptide encoded by the first nucleic acid is immunologically cross reactive with the polypeptide encoded by the second nucleic acid.

[0108] The tissue-preferred promoters disclosed herein, as well as variants and fragments thereof, are useful for genetic engineering of plants, e.g. to produce a transformed or transgenic plant, to express a phenotype of interest. As used herein, the terms “transformed plant” and “transgenic plant” refer to a plant that comprises within its genome a heterologous polynucleotide. Generally, the heterologous polynucleotide is stably integrated within the genome of a transgenic or transformed plant such that the polynucleotide is passed on to successive generations. The heterologous polynucleotide may be integrated into the genome alone or as part of a recombinant DNA construct. It is to be understood that as used herein the term “transgenic” includes any cell, cell line, callus, tissue, plant part or plant the genotype of which has been altered by the presence of a heterologous nucleic acid including those transgenics initially so altered as well as those created by sexual crosses or asexual propagation from the initial transgenic.

[0109] A transgenic “event” is produced by transformation of plant cells with a heterologous DNA construct, including a nucleic acid expression cassette that comprises a gene of interest, the regeneration of a population of plants resulting from the insertion of the transferred gene into the genome of the plant and selection of a plant characterized by insertion into a particular genome location. An event is characterized phenotypically by the expression of the inserted gene. At the genetic level, an event is part of the genetic makeup of a plant. The term “event” also refers to progeny produced by a sexual cross between the transformant and another plant wherein the progeny include the heterologous DNA.

[0110] The term “plant” refers to whole plants, plant organs, plant tissues, seeds, plant cells, seeds and progeny of the same. Plant cells include, without limitation, cells from seeds, suspension cultures, embryos, meristematic regions, callus tissue, leaves, roots, shoots, gametophytes, sporophytes, pollen and microspores.

[0111] Plant parts include differentiated and undifferentiated tissues including, but not limited to the following: roots, stems, shoots, leaves, pollen, seeds, tumor tissue and various forms of cells and culture (e.g., single cells, protoplasts, embryos and callus tissue). The plant tissue may be in a plant or in a plant organ, tissue or cell culture.

[0112] The present disclosure also includes plants obtained by any of the disclosed methods or compositions herein. The present disclosure also includes seeds from a plant obtained by any of the disclosed methods or compositions herein. The term “plant” refers to whole plants, plant organs (e.g., leaves, stems, roots, etc.), plant tissues, plant cells, plant parts, seeds, propagules, embryos and progeny of the same. Plant cells can be differentiated or undifferentiated (e.g. callus, undifferentiated callus, immature and mature embryos, immature zygotic embryo, immature cotyledon, embryonic axis, suspension culture cells, protoplasts, leaf, leaf cells, root cells, phloem cells and pollen). Plant cells include, without limitation, cells from seeds, suspension cultures, explants, immature embryos, embryos, zygotic embryos, somatic embryos, embryogenic callus, meristem, somatic meristems, organogenic callus, protoplasts, embryos derived from mature ear-derived seed, leaf bases, leaves from mature plants, leaf tips, immature influorescences, tassel, immature ear, silks, cotyledons, immature cotyledons, embryonic axes, meristematic regions, callus tissue, cells from leaves, cells from stems, cells from roots, cells from shoots, gametophytes, sporophytes, pollen and microspores. Plant parts include differentiated and undifferentiated tissues including, but not limited to, roots, stems, shoots, leaves, pollen, seeds, tumor tissue and various forms of cells in culture (e. g., single cells, protoplasts, embryos, and callus tissue). The plant tissue may be in a plant or in a plant organ, tissue, or cell culture. Grain is intended to mean the mature seed produced by commercial growers for purposes other than growing or reproducing the species. Progeny, variants and mutants of the regenerated plants are also included within the scope of the disclosure, provided these progeny, variants and mutants comprise the introduced polynucleotides.

[0113] The present disclosure may be used for transformation of any plant species, including, but not limited to, monocots and dicots including, but not limited to maize, alfalfa, sorghum, rice, millet, soybean, wheat, cotton, sunflower, barley, oats, rye, flax, sugarcane, banana, cassava, common bean, cowpea, tomato, potato, beet, grape, Eucalyptus, poplar, pine, douglas fir, citrus, papaya, cacao, cucumber, apple, Capsicum, bamboo, Triticale, melon, and Brassica. Monocots include, but are not limited to, barley, maize (corn), millet (e.g., pearl millet (Pennisetum glaucum), proso millet (Panicum miliaceum), foxtail millet (Setaria italica), finger millet (Eleusine coracana)), oats, rice, rye, Setaria sp., sorghum, triticale, or wheat, or leaf and stem crops, including, but not limited to, bamboo, marram grass, meadow-grass, reeds, ryegrass, sugarcane; lawn grasses, ornamental grasses, and other grasses such as switchgrass and turf grass. Alternatively, dicot plants used in the present disclosure, include, but are not limited to, kale, cauliflower, broccoli, mustard plant, cabbage, pea, clover, alfalfa, broad bean, tomato, peanut, cassava, soybean, canola, sunflower, safflower, tobacco, Arabidopsis, or cotton.

[0114] Higher plants, e.g., classes of Angiospermae and Gymnospermae may be used the present disclosure. Plants of suitable species useful in the present disclosure may come from the family Acanthaceae, Alliaceae, Alstroemeriaceae, Amaryllidaceae, Apocynaceae, Arecaceae, Asteraceae, Berberidaceae, Bixaceae, Brassicaceae, Bromeliaceae, Cannabaceae, Caryophyllaceae, Cephalotaxaceae, Chenopodiaceae, Colchicaceae, Cucurbitaceae, Dioscoreaceae, Ephedraceae, Erythroxylaceae, Euphorbiaceae, Fabaceae, Lamiaceae, Linaceae, Lycopodiaceae, Malvaceae, Melanthiaceae, Musaceae, Myrtaceae, Nyssaceae, Papaveraceae, Pinaceae, Plantaginaceae, Poaceae, Rosaceae, Rubiaceae, Salicaceae, Sapindaceae, Solanaceae, Taxaceae, Theaceae, and Vitaceae. Plants from members of the genus Abelmoschus, Abies, Acer, Agrostis, Allium, Alstroemeria, Ananas, Andrographis, Andropogon, Artemisia, Arundo, Atropa, Berberis, Beta, Bixa, Brassica, Calendula, Camellia, Camptotheca, Cannabis, Capsicum, Carthamus, Catharanthus, Cephalotaxus, Chrysanthemum, Cinchona, Citrullus, Coffea, Colchicum, Coleus, Cucumis, Cucurbita, Cynodon, Datura, Dianthus, Digitalis, Dioscorea, Elaeis, Ephedra, Erianthus, Erythroxylum, Eucalyptus, Festuca, Fragaria, Galanthus, Glycine, Gossypium, Helianthus, Hevea, Hordeum, Hyoscyamus, Jatropha, Lactuca, Linum, Lolium, Lupinus, Lycopersicon, Lycopodium, Manihot, Medicago, Mentha, Miscanthus, Musa, Nicotiana, Oryza, Panicum, Papaver, Parthenium, Pennisetum, Petunia, Phalaris, Phleum, Pinus, Poa, Poinsettia, Populus, Rauwolfia, Ricinus, Rosa, Saccharum, Salix, Sanguinaria, Scopolia, Secale, Solanum, Sorghum, Spartina, Spinacea, Tanacetum, Taxus, Theobroma, Triticosecale, Triticum, Uniola, Veratrum, Vinca, Vitis, and Zea may be used in the methods of the disclosure.

[0115] Plants important or interesting for agriculture, horticulture, biomass production (for production of liquid fuel molecules and other chemicals), and/or forestry may be used in the methods of the disclosure. Non-limiting examples include, for instance, Panicum virgatum (switchgrass), Miscanthus giganteus (miscanthus), Saccharum spp. (sugarcane, energycane), Populus balsamifera (poplar), cotton (Gossypium barbadense, Gossypium hirsutum), Helianthus annuus (sunflower), Medicago sativa (alfalfa), Beta vulgaris (sugarbeet), sorghum (Sorghum bicolor, Sorghum vulgare), Erianthus spp., Andropogon gerardii (big bluestem), Pennisetum purpureum (elephant grass), Phalaris arundinacea (reed canarygrass), Cynodon dactylon (bermudagrass), Festuca arundinacea (tall fescue), Spartina pectinata (prairie cord-grass), Arundo donax (giant reed), Secale cereale (rye), Salix spp. (willow), Eucalyptus spp. (eucalyptus, including E. grandis (and its hybrids, known as “urograndis”), E. globulus, E. camaldulensis, E. tereticornis, E.viminalis, E. nitens, E. saligna and E. urophylla), Triticosecale spp. (triticum—wheat X rye), Bamboo, Carthamus tinctorius (safflower), Jatropha curcas (jatropha), Ricinus communis (castor), Elaeis guineensis (palm), Linum usitatissimum (flax), Manihot esculenta (cassava), Lycopersicon esculentum (tomato), Lactuca sativa (lettuce), Phaseolus vulgaris (green beans), Phaseolus limensis (lima beans), Lathyrus spp. (peas), Musa paradisiaca (banana), Solanum tuberosum (potato), Brassica spp. (B. napus (canola), B. rapa, B. juncea), Brassica oleracea (broccoli, cauliflower, brussel sprouts), Camellia sinensis (tea), Fragaria ananassa (strawberry), Theobroma cacao (cocoa), Coffea arabica (coffee), Vitis vinifera (grape), Ananas comosus (pineapple), Capsicum annum (hot & sweet pepper), Arachis hypogaea (peanuts), Ipomoea batatus (sweet potato), Cocos nucifera (coconut), Citrus spp. (citrus trees), Persea americana (avocado), fig (Ficus casica), guava (Psidium guajava), mango (Mangifera indica), olive (Olea europaea), Carica papaya (papaya), Anacardium occidentale (cashew), Macadamia integrifolia (macadamia tree), Prunus amygdalus (almond), Allium cepa (onion), Cucumis melo (musk melon), Cucumis sativus (cucumber), Cucumis scantalupensis (cantaloupe), Cucurbita maxima (squash), Cucurbita moschata (squash), Spinacea oleracea (spinach), Citrullus lanatus (watermelon), Abelmoschus esculentus (okra), Solanum melongena (eggplant), Cyamopsis tetragonoloba (guar bean), Ceratonia siliqua (locust bean), Trigonella foenum-graecum (fenugreek), Vigna radiata (mung bean), Vigna unguiculata (cowpea), Vicia faba (fava bean), Cicer arietinum (chickpea), Lens culinaris (lentil), Papaver somniferum (opium poppy), Papaver orientale, Taxus baccata, Taxus brevifolia, Artemisia annua, Cannabis sativa, Camptotheca acuminate, Catharanthus roseus, Vinca rosea, Cinchona officinalis, Colchicum autumnale, Veratrum californica., Digitalis lanata, Digitalis purpurea, Dioscorea spp., Andrographis paniculata, Atropa belladonna, Datura stomonium, Berberis spp., Cephalotaxus spp., Ephedra sinica, Ephedra spp., Erythroxylum coca, Galanthus wornorii, Scopolia spp., Lycopodium serratum (Huperzia serrata), Lycopodium spp., Rauwolfia serpentina, Rauwolfia spp., Sanguinaria canadensis, Hyoscyamus spp., Calendula officinalis, Chrysanthemum parthenium, Coleus forskohlii, Tanacetum parthenium, Parthenium argentatum (guayule), Hevea spp. (rubber), Mentha spicata (mint), Mentha piperita (mint), Bixa orellana (achiote), Alstroemeria spp., Rosa spp. (rose), Rhododendron spp. (azalea), Macrophylla hydrangea (hydrangea), Hibiscus rosasanensis (hibiscus), Tulipa spp. (tulips), Narcissus spp. (daffodils), Petunia hybrida (petunias), Dianthus caryophyllus (carnation), Euphorbia pulcherrima (poinsettia), chrysanthemum, Nicotiana tabacum (tobacco), Lupinus albus (lupin), Uniola paniculata (oats), bentgrass (Agrostis spp.), Populus tremuloides (aspen), Pinus spp. (pine), Abies spp. (fir), Acer spp. (maple), Hordeum vulgare (barley), Poa pratensis (bluegrass), Lolium spp. (ryegrass), Phleum pratense (timothy), and conifers.

[0116] Conifers may be used in the present disclosure and include, for example, pines such as loblolly pine (Pinus taeda), slash pine (Pinus elliotii), ponderosa pine (Pinus ponderosa), lodgepole pine (Pinus contorta), and Monterey pine (Pinus radiata); Douglas-fir (Pseudotsuga menziesii); Eastern or Canadian hemlock (Tsuga canadensis); Western hemlock (Tsuga heterophylla); Mountain hemlock (Tsuga mertensiana); Tamarack or Larch (Larix occidentalis); Sitka spruce (Picea glauca); redwood (Sequoia sempervirens); true firs such as silver fir (Abies amabilis) and balsam fir (Abies balsamea); and cedars such as Western red cedar (Thuja plicata) and Alaska yellow-cedar (Chamaecyparis nootkatensis).

[0117] Turf grasses may be used in the present disclosure and include, but are not limited to: annual bluegrass (Poa annua); annual ryegrass (Lolium multiflorum); Canada bluegrass (Poa compressa); colonial bentgrass (Agrostis tenuis); creeping bentgrass (Agrostis palustris); crested wheatgrass (Agropyron desertorum); fairway wheatgrass (Agropyron cristatum); hard fescue (Festuca longifolia); Kentucky bluegrass (Poa pratensis); orchardgrass (Dactylis glomerata); perennial ryegrass (Lolium perenne); red fescue (Festuca rubra); redtop (Agrostis alba); rough bluegrass (Poa trivialis); sheep fescue (Festuca ovina); smooth bromegrass (Bromus inermis); timothy (Phleum pratense); velvet bentgrass (Agrostis canina); weeping alkaligrass (Puccinellia distans); western wheatgrass (Agropyron smithii); St. Augustine grass (Stenotaphrum secundatum); zoysia grass (Zoysia spp.); Bahia grass (Paspalum notatum); carpet grass (Axonopus affinis); centipede grass (Eremochloa ophiuroides); kikuyu grass (Pennisetum clandesinum); seashore paspalum (Paspalum vaginatum); blue gramma (Bouteloua gracilis); buffalo grass (Buchloe dactyloids); sideoats gramma (Bouteloua curtipendula).

[0118] In specific aspects, plants of the present disclosure are crop plants (for example, corn, alfalfa, sunflower, Brassica, soybean, cotton, safflower, peanut, rice. sorghum, wheat, millet, tobacco, etc.). Other plants useful in the present disclosure include barley, oats, rye, flax, sugarcane, banana, cassava, common bean, cowpea, tomato, potato, beet, grape, Eucalyptus, poplar, pine, douglas fir, citrus, papaya, cacao, cucumber, apple, Capsicum, bamboo, Triticale, and melon.

[0119] Additional heterologous coding sequences, heterologous polynucleotides, and polynucleotides of interest expressed by a promoter sequence of the disclosure may be used for varying the phenotype of a plant. Various changes in phenotype are of interest including modifying expression of a gene in a plant, altering a plant's pathogen or insect defense mechanism, increasing a plant's tolerance to herbicides, altering plant development to respond to environmental stress, modulating the plant's response to salt, temperature (hot and cold), drought and the like. These results can be achieved by the expression of a heterologous nucleotide sequence of interest comprising an appropriate gene product. In specific aspects, the heterologous nucleotide sequence of interest is an endogenous plant sequence whose expression level is increased in the plant or plant part. Results can be achieved by providing for altered expression of one or more endogenous gene products, particularly hormones, receptors, signaling molecules, enzymes, transporters or cofactors or by affecting nutrient uptake in the plant. Tissue-preferred expression as provided by the promoters disclosed herein can alter gene product expression. These changes result in a change in phenotype of the transformed plant. In certain aspects, since the expression pattern is tissue-preferred, the expression patterns are useful for many types of screening.

[0120] General categories of nucleotide sequences of interest for the present disclosure include, for example, those genes involved in information, such as zinc fingers, those involved in communication, such as kinases and those involved in housekeeping, such as heat shock proteins. More specific categories of transgenes, for example, include genes encoding important traits for agronomics, insect resistance, disease resistance, herbicide resistance, environmental stress resistance (altered tolerance to cold, salt, drought, etc.) and grain characteristics. Still other categories of transgenes include genes for inducing expression of exogenous products such as enzymes, cofactors, and hormones from plants and other eukaryotes as well as prokaryotic organisms. It is recognized that any gene or polynucleotide of interest can be operably linked to a promoter of the disclosure and expressed in a plant.

[0121] Multiple genes of interest can be operably linked to a promoter of the disclosure and expressed in a plant, for example the WUS/WOX genes can be stacked with insect resistance traits which can also be stacked with one or more additional input traits (e.g., herbicide resistance, fungal resistance, virus resistance, stress tolerance, disease resistance, male sterility, stalk strength, and the like) or output traits (e.g., increased yield, modified starches, improved oil profile, balanced amino acids, high lysine or methionine, increased digestibility, improved fiber quality, drought resistance, nutritional enhancement, and the like).

[0122] A promoter of the disclosure can be operably linked to agronomically important traits that affect quality of grain, such as levels (increasing content of oleic acid) and types of oils, saturated and unsaturated, quality and quantity of essential amino acids, increasing levels of lysine and sulfur, levels of cellulose, and starch and protein content. A promoter of the disclosure can be operably linked to genes providing hordothionin protein modifications in corn which are described in U.S. Pat. Nos. 5,990,389; 5,885,801; 5,885,802 and 5,703,049; herein incorporated by reference in their entirety. Another example of a gene to which a promoter of the disclosure can be operably linked to is a lysine and/or sulfur rich seed protein encoded by the soybean 2S albumin described in U.S. Pat. No. 5,850,016, filed Mar. 20, 1996 and the chymotrypsin inhibitor from barley, Williamson, et al., (1987) Eur. J. Biochem 165:99-106, the disclosures of which are herein incorporated by reference in their entirety.

[0123] A promoter of the disclosure can be operably linked to insect resistance genes that encode resistance to pests that have great yield drag such as rootworm, cutworm, European corn borer and the like. Such genes include, for example, Bacillus thuringiensis toxic protein genes, U.S. Pat. Nos. 5,366,892; 5,747,450; 5,736,514; 5,723,756; 5,593,881 and Geiser, et al., (1986) Gene 48:109, the disclosures of which are herein incorporated by reference in their entirety. Genes encoding disease resistance traits that can be operably linked to a promoter of the disclosure include, for example, detoxification genes, such as those which detoxify fumonisin (U.S. Pat. No. 5,792,931); avirulence (avr) and disease resistance (R) genes (Jones, et al., (1994) Science 266:789; Martin, et al., (1993) Science 262:1432; and Mindrinos, et al., (1994) Cell 78:1089), herein incorporated by reference in their entirety.

[0124] Herbicide resistance traits that can be operably linked to a promoter of the disclosure include genes coding for resistance to herbicides that act to inhibit the action of acetolactate synthase (ALS), in particular the sulfonylurea-type herbicides (e.g., the acetolactate synthase (ALS) gene containing mutations leading to such resistance, in particular the S4 and/or Hra mutations), genes coding for resistance to herbicides that act to inhibit action of glutamine synthase, such as phosphinothricin or basta (e.g., the bar gene), genes coding for resistance to glyphosate (e.g., the EPSPS gene and the GAT gene; see, for example, US Patent Application Publication Number 2004/0082770 and WO 03/092360, herein incorporated by reference in their entirety) or other such genes known in the art. The bar gene encodes resistance to the herbicide basta, the nptII gene encodes resistance to the antibiotics kanamycin and geneticin and the ALS-gene mutants encode resistance to the herbicide chlorsulfuron any and all of which can be operably linked to a promoter of the disclosure.

[0125] Glyphosate resistance is imparted by mutant 5-enolpyruvl-3-phosphikimate synthase (EPSP) and aroA genes which can be operably linked to a promoter of the disclosure. See, for example, U.S. Pat. No. 4,940,835 to Shah, et al., which discloses the nucleotide sequence of a form of EPSPS which can confer glyphosate resistance. U.S. Pat. No. 5,627,061 to Barry, et al., also describes genes encoding EPSPS enzymes which can be operably linked to a promoter of the disclosure. See also, U.S. Pat. Nos. 6,248,876 B1; 6,040,497; 5,804,425; 5,633,435; 5,145,783; 4,971,908; 5,312,910; 5,188,642; 4,940,835; 5,866,775; 6,225,114 B1; 6,130,366; 5,310,667; 4,535,060; 4,769,061; 5,633,448; 5,510,471; Re. 36,449; RE 37,287 E and 5,491,288 and international publications WO 97/04103; WO 97/04114; WO 00/66746; WO 01/66704; WO 00/66747 and WO 00/66748, which are incorporated herein by reference in their entirety. Glyphosate resistance is also imparted to plants that express a gene which can be operably linked to a promoter of the disclosure that encodes a glyphosate oxido-reductase enzyme as described more fully in U.S. Pat. Nos. 5,776,760 and 5,463,175, which are incorporated herein by reference in their entirety. Glyphosate resistance can also be imparted to plants by the over expression of genes which can be operably linked to a promoter of the disclosure encoding glyphosate N-acetyltransferase. See, for example, U.S. patent application Ser. Nos. 11/405,845 and 10/427,692, herein incorporated by reference in their entirety.

[0126] Sterility genes operably linked to a promoter of the disclosure can also be encoded in a DNA construct and provide an alternative to physical detasseling. Examples of genes used in such ways include male tissue-preferred genes and genes with male sterility phenotypes such as QM, described in U.S. Pat. No. 5,583,210, herein incorporated by reference in its entirety. Other genes which can be operably linked to a promoter of the disclosure include kinases and those encoding compounds toxic to either male or female gametophytic development.

[0127] Commercial traits can also be encoded on a gene or genes operably linked to a promoter of the disclosure that could increase for example, starch for ethanol production, or provide expression of proteins. Another important commercial use of transformed plants is the production of polymers and bioplastics such as described in U.S. Pat. No. 5,602,321, herein incorporated by reference in its entirety. Genes such as β-Ketothiolase, PHBase (polyhydroxybutyrate synthase), and acetoacetyl-CoA reductase which can be operably linked to a promoter of the disclosure (see, Schubert, et al., (1988) J. Bacteriol. 170:5837-5847, herein incorporated by reference in its entirety) facilitate expression of polyhydroxyalkanoates (PHAs).

[0128] Examples of other applicable genes and their associated phenotype which can be operably linked to a promoter of the disclosure include the gene which encodes viral coat protein and/or RNA, or other viral or plant genes that confer viral resistance; genes that confer fungal resistance; genes that promote yield improvement; and genes that provide for resistance to stress, such as cold, dehydration resulting from drought, heat and salinity, toxic metal or trace elements or the like.

[0129] By way of illustration, without intending to be limiting, the following is a list of other examples of the types of genes which can be operably linked to a promoter sequence of the disclosure.

[0130] 1. Transgenes That Confer Resistance To Insects Or Disease And That Encode:

[0131] (A) Plant disease resistance genes. Plant defenses are often activated by specific interaction between the product of a disease resistance gene (R) in the plant and the product of a corresponding avirulence (Avr) gene in the pathogen. A plant variety can be transformed with a cloned resistance gene to engineer plants that are resistant to specific pathogen strains. See, for example Jones, et al., (1994) Science 266:789 (cloning of the tomato Cf-9 gene for resistance to Cladosporium fulvum); Martin, et al., (1993) Science 262:1432 (tomato Pto gene for resistance to Pseudomonas syringae pv. tomato encodes a protein kinase); Mindrinos, et al., (1994) Cell 78:1089 (Arabidopsis RSP2 gene for resistance to Pseudomonas syringae); McDowell and Woffenden, (2003) Trends Biotechnol. 21(4):178-83 and Toyoda, et al., (2002) Transgenic Res. 11(6):567-82, herein incorporated by reference in their entirety. A plant resistant to a disease is one that is more resistant to a pathogen as compared to the wild type plant.

[0132] (B) A Bacillus thuringiensis protein, a derivative thereof or a synthetic polypeptide modeled thereon. See, for example, Geiser, et al., (1986) Gene 48:109, who disclose the cloning and nucleotide sequence of a Bt delta-endotoxin gene. Moreover, DNA molecules encoding delta-endotoxin genes can be purchased from American Type Culture Collection (Rockville, Md.), for example, under ATCC Accession Numbers 40098, 67136, 31995 and 31998. Other examples of Bacillus thuringiensis transgenes being genetically engineered are given in the following patents and patent applications and hereby are incorporated by reference for this purpose: U.S. Pat. Nos. 5,188,960; 5,689,052; 5,880,275; WO 91/14778; WO 99/31248; WO 01/12731; WO 99/24581; WO 97/40162 and U.S. application Ser. Nos. 10/032,717; 10/414,637 and 10/606,320, herein incorporated by reference in their entirety.

[0133] (C) An insect-specific hormone or pheromone such as an ecdysteroid and juvenile hormone, a variant thereof, a mimetic based thereon, or an antagonist or agonist thereof. See, for example, the disclosure by Hammock, et al., (1990) Nature 344:458, of baculovirus expression of cloned juvenile hormone esterase, an inactivator of juvenile hormone, herein incorporated by reference in its entirety.

[0134] (D) An insect-specific peptide which, upon expression, disrupts the physiology of the affected pest. For example, see the disclosures of Regan, (1994) J. Biol. Chem. 269:9 (expression cloning yields DNA coding for insect diuretic hormone receptor); Pratt, et al., (1989) Biochem. Biophys. Res. Comm. 163:1243 (an allostatin is identified in Diploptera puntata); Chattopadhyay, et al., (2004) Critical Reviews in Microbiology 30(1):33-54; Zjawiony, (2004) J Nat Prod 67(2):300-310; Carlini and Grossi-de-Sa, (2002) Toxicon 40(11):1515-1539; Ussuf, et al., (2001) Curr Sci. 80(7):847-853 and Vasconcelos and Oliveira, (2004) Toxicon 44(4):385-403, herein incorporated by reference in their entirety. See also, U.S. Pat. No. 5,266,317 to Tomalski, et al., who disclose genes encoding insect-specific toxins, herein incorporated by reference in its entirety.

[0135] (E) An enzyme responsible for a hyperaccumulation of a monterpene, a sesquiterpene, a steroid, hydroxamic acid, a phenylpropanoid derivative or another non-protein molecule with insecticidal activity.

[0136] (F) An enzyme involved in the modification, including the post-translational modification, of a biologically active molecule; for example, a glycolytic enzyme, a proteolytic enzyme, a lipolytic enzyme, a nuclease, a cyclase, a transaminase, an esterase, a hydrolase, a phosphatase, a kinase, a phosphorylase, a polymerase, an elastase, a chitinase and a glucanase, whether natural or synthetic. See, PCT Application Number WO 93/02197 in the name of Scott, et al., which discloses the nucleotide sequence of a callase gene, herein incorporated by reference in its entirety. DNA molecules which contain chitinase-encoding sequences can be obtained, for example, from the ATCC under Accession Numbers 39637 and 67152. See also, Kramer, et al., (1993) Insect Biochem. Molec. Biol. 23:691, who teach the nucleotide sequence of a cDNA encoding tobacco hookworm chitinase, and Kawalleck, et al., (1993) Plant Molec. Biol. 21:673, who provide the nucleotide sequence of the parsley ub14-2 polyubiquitin gene, U.S. patent application Ser. Nos. 10/389,432, 10/692,367 and U.S. Pat. No. 6,563,020, herein incorporated by reference in their entirety.

[0137] (G) A molecule that stimulates signal transduction. For example, see the disclosure by Botella, et al., (1994) Plant Molec. Biol. 24:757, of nucleotide sequences for mung bean calmodulin cDNA clones, and Griess, et al., (1994) Plant Physiol. 104:1467, who provide the nucleotide sequence of a maize calmodulin cDNA clone, herein incorporated by reference in their entirety.

[0138] (H) A hydrophobic moment peptide. See, PCT Application Number WO 95/16776 and U.S. Pat. No. 5,580,852 (disclosure of peptide derivatives of Tachyplesin which inhibit fungal plant pathogens) and PCT Application Number WO 95/18855 and U.S. Pat. No. 5,607,914) (teaches synthetic antimicrobial peptides that confer disease resistance), herein incorporated by reference in their entirety.

[0139] (I) A membrane permease, a channel former or a channel blocker. For example, see the disclosure by Jaynes, et al., (1993) Plant Sci. 89:43, of heterologous expression of a cecropin-beta lytic peptide analog to render transgenic tobacco plants resistant to Pseudomonas solanacearum, herein incorporated by reference in its entirety.

[0140] (J) A viral-invasive protein or a complex toxin derived therefrom. For example, the accumulation of viral coat proteins in transformed plant cells imparts resistance to viral infection and/or disease development effected by the virus from which the coat protein gene is derived, as well as by related viruses. See, Beachy, et al., (1990) Ann. Rev. Phytopathol. 28:451, herein incorporated by reference in its entirety. Coat protein-mediated resistance has been conferred upon transformed plants against alfalfa mosaic virus, cucumber mosaic virus, tobacco streak virus, potato virus X, potato virus Y, tobacco etch virus, tobacco rattle virus and tobacco mosaic virus. Id.

[0141] (K) An insect-specific antibody or an immunotoxin derived therefrom. Thus, an antibody targeted to a critical metabolic function in the insect gut would inactivate an affected enzyme, killing the insect. Cf Taylor, et al., Abstract #497, SEVENTH INT'L SYMPOSIUM ON MOLECULAR PLANT-MICROBE INTERACTIONS (Edinburgh, Scotland, 1994) (enzymatic inactivation in transgenic tobacco via production of single-chain antibody fragments), herein incorporated by reference in its entirety.

[0142] (L) A virus-specific antibody. See, for example, Tavladoraki, et al., (1993) Nature 366:469, who show that transgenic plants expressing recombinant antibody genes are protected from virus attack, herein incorporated by reference in its entirety.

[0143] (M) A developmental-arrestive protein produced in nature by a pathogen or a parasite. Thus, fungal endo alpha-1,4-D-polygalacturonases facilitate fungal colonization and plant nutrient release by solubilizing plant cell wall homo-alpha-1,4-D-galacturonase. See, Lamb, et al., (1992) Bio/Technology 10:1436, herein incorporated by reference in its entirety. The cloning and characterization of a gene which encodes a bean endopolygalacturonase-inhibiting protein is described by Toubart, et al., (1992) Plant J. 2:367, herein incorporated by reference in its entirety.

[0144] (N) A developmental-arrestive protein produced in nature by a plant. For example, Logemann, et al., (1992) Bio/Technology 10:305, herein incorporated by reference in its entirety, have shown that transgenic plants expressing the barley ribosome-inactivating gene have an increased resistance to fungal disease.

[0145] (O) Genes involved in the Systemic Acquired Resistance (SAR) Response and/or the pathogenesis related genes. Briggs, (1995) Current Biology 5(2):128-131, Pieterse and Van Loon, (2004) Curr. Opin. Plant Bio. 7(4):456-64 and Somssich, (2003) Cell 113(7):815-6, herein incorporated by reference in their entirety.

[0146] (P) Antifungal genes (Cornelissen and Melchers, (1993) Pl. Physiol. 101:709-712 and Parijs, et al., (1991) Planta 183:258-264 and Bushnell, et al., (1998) Can. J. of Plant Path. 20(2):137-149. Also see, U.S. patent application Ser. No. 09/950,933, herein incorporated by reference in their entirety.

[0147] (Q) Detoxification genes, such as for fumonisin, beauvericin, moniliformin and zearalenone and their structurally related derivatives. For example, see, U.S. Pat. No. 5,792,931, herein incorporated by reference in its entirety.

[0148] (R) Cystatin and cysteine proteinase inhibitors. See, U.S. application Ser. No. 10/947,979, herein incorporated by reference in its entirety.

[0149] (S) Defensin genes. See, WO03/000863 and U.S. application Ser. No. 10/178,213, herein incorporated by reference in their entirety.

[0150] (T) Genes conferring resistance to nematodes. See, WO 03/033651 and Urwin, et. al., (1998) Planta 204:472-479, Williamson (1999) Curr Opin Plant Bio. 2(4):327-31, herein incorporated by reference in their entirety.

[0151] (U) Genes such as rcglconferring resistance to Anthracnose stalk rot, which is caused by the fungus Colletotrichum graminiola. See, Jung, et al., Generation-means analysis and quantitative trait locus mapping of Anthracnose Stalk Rot genes in Maize, Theor. Appl. Genet. (1994) 89:413-418, as well as, US Provisional Patent Application Number 60/675,664, herein incorporated by reference in their entirety.

[0152] 2. Transgenes That Confer Resistance To A Herbicide, For Example:

[0153] (A) A herbicide that inhibits the growing point or meristem, such as an imidazolinone or a sulfonylurea. Exemplary genes in this category code for mutant ALS and AHAS enzyme as described, for example, by Lee, et al., (1988) EMBO J. 7:1241 and Miki, et al., (1990) Theor. Appl. Genet. 80:449, respectively. See also, U.S. Pat. Nos. 5,605,011; 5,013,659; 5,141,870; 5,767,361; 5,731,180; 5,304,732; 4,761,373; 5,331,107; 5,928,937 and 5,378,824 and international publication WO 96/33270, which are incorporated herein by reference in their entirety.

[0154] (B) Glyphosate (resistance imparted by mutant 5-enolpyruvl-3-phosphikimate synthase (EPSP) and aroA genes, respectively) and other phosphono compounds such as glufosinate (phosphinothricin acetyl transferase (PAT) and Streptomyces hygroscopicus phosphinothricin acetyl transferase (bar) genes) and pyridinoxy or phenoxy proprionic acids and cycloshexones (ACCase inhibitor-encoding genes). See, for example, U.S. Pat. No. 4,940,835 to Shah, et al., which discloses the nucleotide sequence of a form of EPSPS which can confer glyphosate resistance. U.S. Pat. No. 5,627,061 to Barry, et al., also describes genes encoding EPSPS enzymes. See also, U.S. Pat. Nos. 6,566,587; 6,338,961; 6,248,876 B1; 6,040,497; 5,804,425; 5,633,435; 5,145,783; 4,971,908; 5,312,910; 5,188,642; 4,940,835; 5,866,775; 6,225,114 B1; 6,130,366; 5,310,667; 4,535,060; 4,769,061; 5,633,448; 5,510,471; Re. 36,449; RE 37,287 E and 5,491,288 and international publications EP1173580; WO 01/66704; EP1173581 and EP1173582, which are incorporated herein by reference in their entirety. Glyphosate resistance is also imparted to plants that express a gene that encodes a glyphosate oxido-reductase enzyme as described more fully in U.S. Pat. Nos. 5,776,760 and 5,463,175, which are incorporated herein by reference in their entirety. In addition glyphosate resistance can be imparted to plants by the over expression of genes encoding glyphosate N-acetyltransferase. See, for example, U.S. patent application Ser. Nos. 11/405,845 and 10/427,692 and PCT Application Number US01/46227, herein incorporated by reference in their entirety. A DNA molecule encoding a mutant aroA gene can be obtained under ATCC Accession Number 39256 and the nucleotide sequence of the mutant gene is disclosed in U.S. Pat. No. 4,769,061 to Comai, herein incorporated by reference in its entirety. EP Patent Application Number 0 333 033 to Kumada, et al., and U.S. Pat. No. 4,975,374 to Goodman, et al., disclose nucleotide sequences of glutamine synthetase genes which confer resistance to herbicides such as L-phosphinothricin, herein incorporated by reference in their entirety. The nucleotide sequence of a phosphinothricin-acetyl-transferase gene is provided in EP Patent Numbers 0 242 246 and 0 242 236 to Leemans, et al., De Greef, et al., (1989) Bio/Technology 7:61 which describe the production of transgenic plants that express chimeric bar genes coding for phosphinothricin acetyl transferase activity, herein incorporated by reference in their entirety. See also, U.S. Pat. Nos. 5,969,213; 5,489,520; 5,550,318; 5,874,265; 5,919,675; 5,561,236; 5,648,477; 5,646,024; 6,177,616 B1 and 5,879,903, herein incorporated by reference in their entirety. Exemplary genes conferring resistance to phenoxy proprionic acids and cycloshexones, such as sethoxydim and haloxyfop, are the Acc1-S1, Acc1-S2 and Acc1-S3 genes described by Marshall, et al., (1992) Theor. Appl. Genet. 83:435, herein incorporated by reference in its entirety.

[0155] (C) A herbicide that inhibits photosynthesis, such as a triazine (psbA and gs+ genes) and a benzonitrile (nitrilase gene). Przibilla, et al., (1991) Plant Cell 3:169, herein incorporated by reference in its entirety, describe the transformation of Chlamydomonas with plasmids encoding mutant psbA genes. Nucleotide sequences for nitrilase genes are disclosed in U.S. Pat. No. 4,810,648 to Stalker, herein incorporated by reference in its entirety, and DNA molecules containing these genes are available under ATCC Accession Numbers 53435, 67441 and 67442. Cloning and expression of DNA coding for a glutathione S-transferase is described by Hayes, et al., (1992) Biochem. 1 285:173, herein incorporated by reference in its entirety.

[0156] (D) Acetohydroxy acid synthase, which has been found to make plants that express this enzyme resistant to multiple types of herbicides, has been introduced into a variety of plants (see, e.g., Hattori, et al., (1995) Mol Gen Genet 246:419, herein incorporated by reference in its entirety). Other genes that confer resistance to herbicides include: a gene encoding a chimeric protein of rat cytochrome P4507A1 and yeast NADPH-cytochrome P450 oxidoreductase (Shiota, et al., (1994) Plant Physiol. 106(1):17-23), genes for glutathione reductase and superoxide dismutase (Aono, et al., (1995) Plant Cell Physiol 36:1687, and genes for various phosphotransferases (Datta, et al., (1992) Plant Mol Biol 20:619), herein incorporated by reference in their entirety.

[0157] (E) Protoporphyrinogen oxidase (protox) is necessary for the production of chlorophyll, which is necessary for all plant survival. The protox enzyme serves as the target for a variety of herbicidal compounds. These herbicides also inhibit growth of all the different species of plants present, causing their total destruction. The development of plants containing altered protox activity which are resistant to these herbicides are described in U.S. Pat. Nos. 6,288,306 B1; 6,282,837 B1 and 5,767,373; and international publication number WO 01/12825, herein incorporated by reference in their entirety.

[0158] 3. Transgenes That Confer Or Contribute To an Altered Grain Characteristic, Such As:

[0159] (A) Altered fatty acids, for example, by

[0160] (1) Down-regulation of stearoyl-ACP desaturase to increase stearic acid content of the plant. See, Knultzon, et al., (1992) Proc. Natl. Acad. Sci. USA 89:2624 and WO99/64579 (Genes for Desaturases to Alter Lipid Profiles in Corn), herein incorporated by reference in their entirety,

[0161] (2) Elevating oleic acid via FAD-2 gene modification and/or decreasing linolenic acid via FAD-3 gene modification (see, U.S. Pat. Nos. 6,063,947; 6,323,392; 6,372,965 and WO 93/11245, herein incorporated by reference in their entirety),

[0162] (3) Altering conjugated linolenic or linoleic acid content, such as in WO 01/12800, herein incorporated by reference in its entirety,

[0163] (4) Altering LEC1, AGP, Dek1, Superal1, mi1ps, various 1pa genes such as 1pa1, 1pa3, hpt or hggt. For example, see, WO 02/42424, WO 98/22604, WO 03/011015, U.S. Pat. Nos. 6,423,886, 6,197,561, 6,825,397, US Patent Application Publication Numbers 2003/0079247, 2003/0204870, WO02/057439, WO03/011015 and Rivera-Madrid, et. al., (1995) Proc. Natl. Acad. Sci. 92:5620-5624, herein incorporated by reference in their entirety.

[0164] (B) Altered phosphorus content, for example, by the

[0165] (1) Introduction of a phytase-encoding gene would enhance breakdown of phytate, adding more free phosphate to the transformed plant. For example, see, Van Hartingsveldt, et al., (1993) Gene 127:87, for a disclosure of the nucleotide sequence of an Aspergillus niger phytase gene, herein incorporated by reference in its entirety.

[0166] (2) Up-regulation of a gene that reduces phytate content. In maize, this, for example, could be accomplished, by cloning and then re-introducing DNA associated with one or more of the alleles, such as the LPA alleles, identified in maize mutants characterized by low levels of phytic acid, such as in Raboy, et al., (1990) Maydica 35:383 and/or by altering inositol kinase activity as in WO 02/059324, US Patent Application Publication Number 2003/0009011, WO 03/027243, US Patent Application Publication Number 2003/0079247, WO 99/05298, U.S. Pat. Nos. 6,197,561, 6,291,224, 6,391,348, WO2002/059324, US Patent Application Publication Number 2003/0079247, WO98/45448, WO99/55882, WO01/04147, herein incorporated by reference in their entirety.

[0167] (C) Altered carbohydrates effected, for example, by altering a gene for an enzyme that affects the branching pattern of starch or a gene altering thioredoxin such as NTR and/or TRX (see, U.S. Pat. No. 6,531,648, which is incorporated by reference in its entirety) and/or a gamma zein knock out or mutant such as cs27 or TUSC27 or en27 (see, U.S. Pat. No. 6,858,778 and US Patent Application Publication Numbers 2005/0160488 and 2005/0204418; which are incorporated by reference in its entirety). See, Shiroza, et al., (1988) J. Bacteriol. 170:810 (nucleotide sequence of Streptococcus mutans fructosyltransferase gene), Steinmetz, et al., (1985) Mol. Gen. Genet. 200:220 (nucleotide sequence of Bacillus subtilis levansucrase gene), Pen, et al., (1992) Bio/Technology 10:292 (production of transgenic plants that express Bacillus licheniformis alpha-amylase), Elliot, et al., (1993) Plant Molec. Biol. 21:515 (nucleotide sequences of tomato invertase genes), Søgaard, et al., (1993) J. Biol. Chem. 268:22480 (site-directed mutagenesis of barley alpha-amylase gene) and Fisher, et al., (1993) Plant Physiol. 102:1045 (maize endosperm starch branching enzyme II), WO 99/10498 (improved digestibility and/or starch extraction through modification of UDP-D-xylose 4-epimerase, Fragile 1 and 2, Ref1, HCHL, C4H), U.S. Pat. No. 6,232,529 (method of producing high oil seed by modification of starch levels (AGP)), herein incorporated by reference in their entirety. The fatty acid modification genes mentioned above may also be used to affect starch content and/or composition through the interrelationship of the starch and oil pathways.

[0168] (D) Altered antioxidant content or composition, such as alteration of tocopherol or tocotrienols. For example, see U.S. Pat. No. 6,787,683, US Patent Application Publication Number 2004/0034886 and WO 00/68393 involving the manipulation of antioxidant levels through alteration of a phytl prenyl transferase (ppt), WO 03/082899 through alteration of a homogentisate geranyl geranyl transferase (hggt), herein incorporated by reference in their entirety.

[0169] (E) Altered essential seed amino acids. For example, see U.S. Pat. No. 6,127,600 (method of increasing accumulation of essential amino acids in seeds), U.S. Pat. No. 6,080,913 (binary methods of increasing accumulation of essential amino acids in seeds), U.S. Pat. No. 5,990,389 (high lysine), WO99/40209 (alteration of amino acid compositions in seeds), WO99/29882 (methods for altering amino acid content of proteins), U.S. Pat. No. 5,850,016 (alteration of amino acid compositions in seeds), WO98/20133 (proteins with enhanced levels of essential amino acids), U.S. Pat. No. 5,885,802 (high methionine), U.S. Pat. No. 5,885,801 (high threonine), U.S. Pat. No. 6,664,445 (plant amino acid biosynthetic enzymes), U.S. Pat. No. 6,459,019 (increased lysine and threonine), U.S. Pat. No. 6,441,274 (plant tryptophan synthase beta subunit), U.S. Pat. No. 6,346,403 (methionine metabolic enzymes), U.S. Pat. No. 5,939,599 (high sulfur), U.S. Pat. No. 5,912,414 (increased methionine), WO98/56935 (plant amino acid biosynthetic enzymes), WO98/45458 (engineered seed protein having higher percentage of essential amino acids), WO98/42831 (increased lysine), U.S. Pat. No. 5,633,436 (increasing sulfur amino acid content), U.S. Pat. No. 5,559,223 (synthetic storage proteins with defined structure containing programmable levels of essential amino acids for improvement of the nutritional value of plants), WO96/01905 (increased threonine), WO95/15392 (increased lysine), US Patent Application Publication Number 2003/0163838, US Patent Application Publication Number 2003/0150014, US Patent Application Publication Number 2004/0068767, U.S. Pat. No. 6,803,498, WO01/79516, and WO00/09706 (Ces A: cellulose synthase), U.S. Pat. No. 6,194,638 (hemicellulose), U.S. Pat. No. 6,399,859 and US Patent Application Publication Number 2004/0025203 (UDPGdH), U.S. Pat. No. 6,194,638 (RGP), herein incorporated by reference in their entirety.

[0170] 4. Genes that create a site for site specific DNA integration

[0171] This includes the introduction of FRT sites that may be used in the FLP/FRT system and/or Lox sites that may be used in the Cre/Loxp system. For example, see Lyznik, et al., (2003) Plant Cell Rep 21:925-932 and WO 99/25821, which are hereby incorporated by reference in their entirety. Other systems that may be used include the Gin recombinase of phage Mu (Maeser, et al., 1991; Vicki Chandler, The Maize Handbook ch. 118 (Springer-Verlag 1994), the Pin recombinase of E. coli (Enomoto, et al., 1983), and the R/RS system of the pSR1 plasmid (Araki, et al., 1992), herein incorporated by reference in their entirety.

[0172] 5. Genes that affect abiotic stress resistance (including but not limited to flowering, ear and seed development, enhancement of nitrogen utilization efficiency, altered nitrogen responsiveness, drought resistance or tolerance, cold resistance or tolerance, and salt resistance or tolerance) and increased yield under stress. For example, see, WO 00/73475 where water use efficiency is altered through alteration of malate; U.S. Pat. Nos. 5,892,009, 5,965,705, 5,929,305, 5,891,859, 6,417,428, 6,664,446, 6,706,866, 6,717,034, WO2000060089, WO2001026459, WO2001035725, WO2001034726, WO2001035727, WO2001036444, WO2001036597, WO2001036598, WO2002015675, WO2002017430, WO2002077185, WO2002079403, WO2003013227, WO2003013228, WO2003014327, WO2004031349, WO2004076638, WO9809521, and WO9938977 describing genes, including CBF genes and transcription factors effective in mitigating the negative effects of freezing, high salinity, and drought on plants, as well as conferring other positive effects on plant phenotype; US Patent Application Publication Number 2004/0148654 and WO01/36596 where abscisic acid is altered in plants resulting in improved plant phenotype such as increased yield and/or increased tolerance to abiotic stress; WO2000/006341, WO04/090143, U.S. patent application Ser. No. 10/817,483 and U.S. Pat. No. 6,992,237, where cytokinin expression is modified resulting in plants with increased stress tolerance, such as drought tolerance, and/or increased yield, herein incorporated by reference in their entirety. Also see WO0202776, WO2003052063, JP2002281975, U.S. Pat. No. 6,084,153, WO0164898, U.S. Pat. Nos. 6,177,275 and 6,107,547 (enhancement of nitrogen utilization and altered nitrogen responsiveness), herein incorporated by reference in their entirety. For ethylene alteration, see US Patent Application Publication Number 2004/0128719, US Patent Application Publication Number 2003/0166197 and WO200032761, herein incorporated by reference in their entirety. For plant transcription factors or transcriptional regulators of abiotic stress, see, e.g., US Patent Application Publication Number 2004/0098764 or US Patent Application Publication Number 2004/0078852, herein incorporated by reference in their entirety.

[0173] 6. Other genes and transcription factors that affect plant growth and agronomic traits such as yield, flowering, plant growth and/or plant structure, can be introduced or introgressed into plants, see, e.g., WO97/49811 (LHY), WO98/56918 (ESD4), WO97/10339 and U.S. Pat. No. 6,573,430 (TFL), U.S. Pat. No. 6,713,663 (FT), WO96/14414 (CON), WO96/38560, WO01/21822 (VRN1), WO00/44918 (VRN2), WO99/49064 (GI), WO00/46358 (FRI), WO97/29123, U.S. Pat. Nos. 6,794,560, 6,307,126 (GAI), WO99/09174 (D8 and Rht) and WO2004076638 and WO2004031349 (transcription factors), herein incorporated by reference in their entirety.

[0174] The heterologous nucleotide sequence operably linked to a promoter sequence and its related biologically active fragments or variants disclosed herein may be an antisense sequence for a targeted gene. The terminology “antisense DNA nucleotide sequence” is intended to mean a sequence that is in inverse orientation to the 5′-to-3′ normal orientation of that nucleotide sequence. When delivered into a plant cell, expression of the antisense DNA sequence prevents normal expression of the DNA nucleotide sequence for the targeted gene. The antisense nucleotide sequence encodes an RNA transcript that is complementary to and capable of hybridizing to the endogenous messenger RNA (mRNA) produced by transcription of the DNA nucleotide sequence for the targeted gene. In this case, production of the native protein encoded by the targeted gene is inhibited to achieve a desired phenotypic response. Modifications of the antisense sequences may be made as long as the sequences hybridize to and interfere with expression of the corresponding mRNA. In this manner, antisense constructions having 70%, 80%, 85% sequence identity to the corresponding antisense sequences may be used. Furthermore, portions of the antisense nucleotides may be used to disrupt the expression of the target gene. Generally, sequences of at least 50 nucleotides, 100 nucleotides, 200 nucleotides or greater may be used. Thus, the promoter sequences disclosed herein may be operably linked to antisense DNA sequences to reduce or inhibit expression of a native protein in the plant.

[0175] “RNAi” refers to a series of related techniques to reduce the expression of genes (see, for example, U.S. Pat. No. 6,506,559, herein incorporated by reference in its entirety). Older techniques referred to by other names are now thought to rely on the same mechanism, but are given different names in the literature. These include “antisense inhibition,” the production of antisense RNA transcripts capable of suppressing the expression of the target protein and “co-suppression” or “sense-suppression,” which refer to the production of sense RNA transcripts capable of suppressing the expression of identical or substantially similar foreign or endogenous genes (U.S. Pat. No. 5,231,020, incorporated herein by reference in its entirety). Such techniques rely on the use of constructs resulting in the accumulation of double stranded RNA with one strand complementary to the target gene to be silenced. The promoter sequences of the disclosure may be used to drive expression of constructs that will result in RNA interference including microRNAs and siRNAs.

[0176] As used herein, the terms “promoter” or “transcriptional initiation region” mean a regulatory region of DNA usually comprising a TATA box or a DNA sequence capable of directing RNA polymerase II to initiate RNA synthesis at the appropriate transcription initiation site for a particular coding sequence. A promoter may additionally comprise other recognition sequences generally positioned upstream or 5′ to the TATA box or the DNA sequence capable of directing RNA polymerase II to initiate RNA synthesis, referred to as upstream promoter elements, which influence the transcription initiation rate. It is recognized that having identified the nucleotide sequences for the promoter regions disclosed herein, it is within the state of the art to isolate and identify further promoters in the 5′ untranslated region upstream from the particular promoter regions identified herein. Additionally, chimeric promoters may be provided. Such chimeras include portions of the promoter sequence fused to fragments and/or variants of heterologous transcriptional regulatory regions. Thus, the promoter regions disclosed herein can comprise upstream promoters such as, those responsible for tissue and temporal expression of the coding sequence, enhancers and the like.

[0177] As used herein, the term “regulatory element” also refers to a sequence of DNA, usually, but not always, upstream (5′) to the coding sequence of a structural gene, which includes sequences which control the expression of the coding region by providing the recognition for RNA polymerase and/or other factors required for transcription to start at a particular site. An example of a regulatory element that provides for the recognition for RNA polymerase or other transcriptional factors to ensure initiation at a particular site is a promoter element. A promoter element comprises a core promoter element, responsible for the initiation of transcription, as well as other regulatory elements that modify gene expression. It is to be understood that nucleotide sequences, located within introns or 3′ of the coding region sequence may also contribute to the regulation of expression of a coding region of interest. Examples of suitable introns include, but are not limited to, the maize IVS6 intron, or the maize actin intron. A regulatory element may also include those elements located downstream (3′) to the site of transcription initiation, or within transcribed regions, or both. In the context of the present disclosure a post-transcriptional regulatory element may include elements that are active following transcription initiation, for example translational and transcriptional enhancers, translational and transcriptional repressors and mRNA stability determinants.

[0178] The promoters or variants or fragments thereof of the present disclosure, may be operatively associated with heterologous regulatory elements or promoters to modulate the activity of the heterologous regulatory element. Such modulation includes enhancing or repressing transcriptional activity of the heterologous regulatory element, modulating post-transcriptional events, or either enhancing or repressing transcriptional activity of the heterologous regulatory element and modulating post-transcriptional events. For example, one or more promoters or fragments thereof of the present disclosure may be operatively associated with constitutive, inducible or tissue specific promoters or fragments thereof, to modulate the activity of such promoters within desired tissues in plant cells.

[0179] The promoter sequences of the present disclosure or variants or fragments thereof, when operably linked to a morphogenic gene and/or heterologous nucleotide sequence of interest can drive stable or transient expression of the morphogenic gene and/or heterologous nucleotide sequence in the L1 tissue of the plant.

[0180] A “heterologous nucleotide sequence”, “heterologous polynucleotide of interest”, or “heterologous polynucleotide” as used throughout the disclosure, is a sequence that is not naturally occurring with or operably linked to a promoter sequence of the disclosure. While this nucleotide sequence is heterologous to the promoter sequence, it may be homologous or native or heterologous or foreign to the plant host. Likewise, the promoter sequence may be homologous or native or heterologous or foreign to the plant host and/or the polynucleotide of interest.

[0181] The isolated promoter sequences of the present disclosure can be modified to provide for a range of expression levels of the heterologous nucleotide sequence. Thus, less than the entire promoter region may be utilized and the ability to drive expression of the nucleotide sequence of interest retained. It is recognized that expression levels of the mRNA may be altered in different ways with deletions of portions of the promoter sequences. The mRNA expression levels may be decreased, or alternatively, expression may be increased as a result of promoter deletions if, for example, there is a negative regulatory element (for a repressor) that is removed during the truncation process. Generally, at least about 20 nucleotides of an isolated promoter sequence will be used to drive expression of a nucleotide sequence.

[0182] It is recognized that to increase transcription levels, enhancers may be utilized in combination with the promoter regions of the disclosure. Enhancers are nucleotide sequences that act to increase the expression of a promoter region. Enhancers are known in the art and include the SV40 enhancer region, the 35S enhancer element and the like. Some enhancers are also known to alter normal promoter expression patterns, for example, by causing a promoter to be expressed constitutively when without the enhancer, the same promoter is expressed only in one specific tissue or a few specific tissues.

[0183] Modifications of the isolated promoter sequences of the present disclosure can provide for a range of expression of the heterologous nucleotide sequence. Thus, they may be modified to be weak promoters or strong promoters. Generally, a “weak promoter” means a promoter that drives expression of a coding sequence at a low level. A “low level” of expression is intended to mean expression at levels of about 1/10,000 transcripts to about 1/100,000 transcripts to about 1/500,000 transcripts. Conversely, a strong promoter drives expression of a coding sequence at a high level, or at about 1/10 transcripts to about 1/100 transcripts to about 1/1,000 transcripts.

[0184] It is recognized that the promoters of the disclosure may be used with their native coding sequences to increase or decrease expression, thereby resulting in a change in phenotype of the transformed plant. The nucleotide sequences disclosed herein (see Table 1), as well as variants and fragments thereof, are useful in the genetic manipulation of any plant. The regulatory sequences are useful in this aspect when operably linked with a heterologous nucleotide sequence whose expression is to be controlled to achieve a desired phenotypic response. The term “operably linked” means that the transcription or translation of the heterologous nucleotide sequence is under the influence of the promoter sequence. In this manner, the nucleotide sequences for the promoters of the disclosure may be provided in expression cassettes along with heterologous nucleotide sequences of interest for expression in the plant of interest, more particularly for expression in the reproductive tissue of the plant.

[0185] In one aspect of the disclosure, expression cassettes comprise a transcriptional initiation region comprising one of the promoter nucleotide sequences of the present disclosure or variants or fragments thereof, operably linked to a morphogenic gene and/or a heterologous nucleotide sequence. Such an expression cassette can be provided with a plurality of restriction sites for insertion of the nucleotide sequence to be under the transcriptional regulation of the regulatory regions. The expression cassette may additionally contain selectable marker genes as well as 3′ termination regions.

[0186] The expression cassette can include, in the 5′-3′ direction of transcription, a transcriptional initiation region (i.e., a promoter, or variant or fragment thereof, of the disclosure), a translational initiation region, a heterologous nucleotide sequence of interest, a translational termination region and optionally, a transcriptional termination region functional in the host organism. The regulatory regions (i.e., promoters, transcriptional regulatory regions, and translational termination regions) and/or the polynucleotide of the aspects may be native/analogous to the host cell or to each other. Alternatively, the regulatory regions and/or the polynucleotide of the aspects may be heterologous to the host cell or to each other. As used herein, “heterologous” in reference to a sequence is a sequence that originates from a foreign species or, if from the same species, is substantially modified from its native form in composition and/or genomic locus by deliberate human intervention. For example, a promoter operably linked to a heterologous polynucleotide is from a species different from the species from which the polynucleotide was derived or, if from the same/analogous species, one or both are substantially modified from their original form and/or genomic locus or the promoter is not the native promoter for the operably linked polynucleotide.

[0187] The termination region may be native with the transcriptional initiation region, may be native with the operably linked DNA sequence of interest, may be native with the plant host, or may be derived from another source (i.e., foreign or heterologous to the promoter, the DNA sequence being expressed, the plant host, or any combination thereof). Convenient termination regions are available from the Ti-plasmid of A. tumefaciens, such as the octopine synthase and nopaline synthase termination regions. See also, Guerineau, et al., (1991)Mol. Gen. Genet. 262:141-144; Proudfoot, (1991) Cell 64:671-674; Sanfacon, et al., (1991) Genes Dev. 5:141-149; Mogen, et al., (1990) Plant Cell 2:1261-1272; Munroe, et al., (1990) Gene 91:151-158; Ballas, et al., (1989) Nucleic Acids Res. 17:7891-7903; and Joshi, et al., (1987) Nucleic Acid Res. 15:9627-9639, herein incorporated by reference in their entirety.

[0188] The expression cassette comprising the sequences of the present disclosure may also contain at least one additional nucleotide sequence for a gene, heterologous nucleotide sequence, heterologous polynucleotide of interest, or heterologous polynucleotide to be cotransformed into the organism. Alternatively, the additional nucleotide sequence(s) can be provided on another expression cassette.

[0189] Where appropriate, the nucleotide sequences whose expression is to be under the control of the tissue-preferred promoter sequence of the present disclosure and any additional nucleotide sequence(s) may be optimized for increased expression in the transformed plant. That is, these nucleotide sequences can be synthesized using plant preferred codons for improved expression. See, for example, Campbell and Gowri, (1990) Plant Physiol. 92:1-11, herein incorporated by reference in its entirety, for a discussion of host-preferred codon usage. Methods are available in the art for synthesizing plant-preferred genes. See, for example, U.S. Pat. Nos. 5,380,831, 5,436,391 and Murray, et al., (1989) Nucleic Acids Res. 17:477-498, herein incorporated by reference in their entirety.

[0190] Additional sequence modifications are known to enhance gene expression in a cellular host. These include elimination of sequences encoding spurious polyadenylation signals, exon-intron splice site signals, transposon-like repeats and other such well-characterized sequences that may be deleterious to gene expression. The G-C content of the heterologous nucleotide sequence may be adjusted to levels average for a given cellular host, as calculated by reference to known genes expressed in the host cell. When possible, the sequence is modified to avoid predicted hairpin secondary mRNA structures.

[0191] The expression cassettes may additionally contain 5′ leader sequences. Such leader sequences can act to enhance translation. Translation leaders are known in the art and include, without limitation: picornavirus leaders, for example, EMCV leader (Encephalomyocarditis 5′ noncoding region) (Elroy-Stein, et al., (1989) Proc. Nat. Acad. Sci. USA 86:6126-6130); potyvirus leaders, for example, TEV leader (Tobacco Etch Virus) (Allison, et al., (1986) Virology 154:9-20); MDMV leader (Maize Dwarf Mosaic Virus); human immunoglobulin heavy-chain binding protein (BiP) (Macejak, et al., (1991) Nature 353:90-94); untranslated leader from the coat protein mRNA of alfalfa mosaic virus (AMV RNA 4) (Jobling, et al., (1987) Nature 325:622-625); tobacco mosaic virus leader (TMV) (Gallie, et al., (1989) Molecular Biology of RNA, pages 237-256) and maize chlorotic mottle virus leader (MCMV) (Lommel, et al., (1991) Virology 81:382-385), herein incorporated by reference in their entirety. See, also, Della-Cioppa, et al., (1987) Plant Physiology 84:965-968, herein incorporated by reference in its entirety. Methods known to enhance mRNA stability can also be utilized, for example, introns, such as the maize Ubiquitin intron (Christensen and Quail, (1996) Transgenic Res. 5:213-218; Christensen, et al., (1992) Plant Molecular Biology 18:675-689) or the maize AdhI intron (Kyozuka, et al., (1991) Mol. Gen. Genet. 228:40-48; Kyozuka, et al., (1990) Maydica 35:353-357) and the like, herein incorporated by reference in their entirety.

[0192] The DNA constructs of the aspects can also include further enhancers, either translation or transcription enhancers, as may be required. These enhancer regions are well known to persons skilled in the art, and can include the ATG initiation codon and adjacent sequences. The initiation codon must be in phase with the reading frame of the coding sequence to ensure translation of the entire sequence. The translation control signals and initiation codons can be from a variety of origins, both natural and synthetic. Translational initiation regions may be provided from the source of the transcriptional initiation region, or from the structural gene. The sequence can also be derived from the regulatory element selected to express the gene, and can be specifically modified to increase translation of the mRNA. It is recognized that to increase transcription levels enhancers may be utilized in combination with the promoter regions of the aspects. Enhancers are known in the art and include the SV40 enhancer region, the 35S enhancer element, and the like.

[0193] In preparing the expression cassette, the various DNA fragments may be manipulated, to provide for the DNA sequences in the proper orientation and, as appropriate, in the proper reading frame. Toward this end, adapters or linkers may be employed to join the DNA fragments or other manipulations may be involved to provide for convenient restriction sites, removal of superfluous DNA, removal of restriction sites or the like. For this purpose, in vitro mutagenesis, primer repair, restriction, annealing, resubstitutions, for example, transitions and transversions, may be involved.

[0194] Reporter genes or selectable marker genes may also be included in the expression cassettes of the present disclosure. Examples of suitable reporter genes known in the art can be found in, for example, Jefferson, et al., (1991) in Plant Molecular Biology Manual, ed. Gelvin, et al., (Kluwer Academic Publishers), pp. 1-33; DeWet, et al., (1987) Mol. Cell. Biol. 7:725-737; Goff, et al., (1990) EMBO J. 9:2517-2522; Kain, et al., (1995) Bio Techniques 19:650-655 and Chiu, et al., (1996) Current Biology 6:325-330, herein incorporated by reference in their entirety.

[0195] Selectable marker genes for selection of transformed cells or tissues can include genes that confer antibiotic resistance or resistance to herbicides. Examples of suitable selectable marker genes include, but are not limited to, genes encoding resistance to chloramphenicol (Herrera Estrella, et al., (1983) EMBO 1 2:987-992); methotrexate (Herrera Estrella, et al., (1983) Nature 303:209-213; Meijer, et al., (1991) Plant Mol. Biol. 16:807-820); hygromycin (Waldron, et al., (1985) Plant Mol. Biol. 5:103-108 and Zhijian, et al., (1995) Plant Science 108:219-227); streptomycin (Jones, et al., (1987) Mol. Gen. Genet. 210:86-91); spectinomycin (Bretagne-Sagnard, et al., (1996) Transgenic Res. 5:131-137); bleomycin (Hille, et al., (1990) Plant Mol. Biol. 7:171-176); sulfonamide (Guerineau, et al., (1990) Plant Mot. Biol. 15:127-36); bromoxynil (Stalker, et al., (1988) Science 242:419-423); glyphosate (Shaw, et al., (1986) Science 233:478-481 and U.S. patent application Ser. Nos. 10/004,357 and 10/427,692); phosphinothricin (DeBlock, et al., (1987) EMBO J. 6:2513-2518), herein incorporated by reference in their entirety.

[0196] Other genes that could serve utility in the recovery of transgenic events would include, but are not limited to, examples such as GUS (beta-glucuronidase; Jefferson, (1987) Plant Mot. Biol. Rep. 5:387), GFP (green fluorescence protein; Chalfie, et al., (1994) Science 263:802), luciferase (Riggs, et al., (1987) Nucleic Acids Res. 15(19):8115 and Luehrsen, et al., (1992) Methods Enzymol. 216:397-414) and the maize genes encoding for anthocyanin production (Ludwig, et al., (1990) Science 247:449), herein incorporated by reference in their entirety.

[0197] The expression cassette comprising the promoter sequences of the present disclosure operably linked a morphogenic gene and optionally further operably linked to a heterologous nucleotide sequence, a heterologous polynucleotide of interest, a heterologous polynucleotide nucleotide, or a sequence of interest can be used to transform any plant. In this manner, genetically modified plants, plant cells, plant tissue, seed, root and the like can be obtained.

[0198] As used herein, “vector” refers to a DNA molecule such as a plasmid, cosmid or bacterial phage for introducing a nucleotide construct, for example, an expression cassette or construct, into a host cell. Cloning vectors typically contain one or a small number of restriction endonuclease recognition sites at which foreign DNA sequences can be inserted in a determinable fashion without loss of essential biological function of the vector, as well as a marker gene that is suitable for use in the identification and selection of cells transformed with the cloning vector. Marker genes typically include genes that provide tetracycline resistance, hygromycin resistance or ampicillin resistance.

[0199] The methods of the disclosure involve introducing a polypeptide or polynucleotide into a plant. As used herein, “introducing” means presenting to the plant the polynucleotide or polypeptide in such a manner that the sequence gains access to the interior of a cell of the plant. The methods of the disclosure do not depend on a particular method for introducing a sequence into a plant, only that the polynucleotide or polypeptides gains access to the interior of at least one cell of the plant. Methods for introducing polynucleotide or polypeptides into plants are known in the art including, but not limited to, stable transformation methods, transient transformation methods and virus-mediated methods.

[0200] A “stable transformation” is a transformation in which the nucleotide construct introduced into a plant integrates into the genome of the plant and is capable of being inherited by the progeny thereof. “Transient transformation” means that a polynucleotide is introduced into the plant and does not integrate into the genome of the plant or a polypeptide is introduced into a plant.

[0201] Transformation protocols as well as protocols for introducing nucleotide sequences into plants may vary depending on the type of plant or plant cell, i.e., monocot or dicot, targeted for transformation. Suitable methods of introducing nucleotide sequences into plant cells and subsequent insertion into the plant genome include microinjection (Crossway, et al., (1986) Biotechniques 4:320-334), electroporation (Riggs, et al., (1986) Proc. Natl. Acad. Sci. USA 83:5602-5606), Agrobacterium-mediated transformation (Townsend, et al., U.S. Pat. No. 5,563,055 and Zhao, et al., U.S. Pat. No. 5,981,840), direct gene transfer (Paszkowski, et al., (1984) EMBO J. 3:2717-2722) and ballistic particle acceleration (see, for example, U.S. Pat. Nos. 4,945,050; 5,879,918; 5,886,244; 5,932,782; Tomes, et al., (1995) in Plant Cell, Tissue, and Organ Culture: Fundamental Methods, ed. Gamborg and Phillips (Springer-Verlag, Berlin); McCabe, et al., (1988) Biotechnology 6:923-926) and Lec1 transformation (WO 00/28058). Also see, Weissinger, et al., (1988) Ann. Rev. Genet. 22:421-477; Sanford, et al., (1987) Particulate Science and Technology 5:27-37 (onion); Christou, et al., (1988) Plant Physiol. 87:671-674 (soybean); McCabe, et al., (1988) Bio/Technology 6:923-926 (soybean); Finer and McMullen, (1991) In Vitro Cell Dev. Biol. 27P:175-182 (soybean); Singh, et al., (1998) Theor. Appl. Genet. 96:319-324 (soybean); Datta, et al., (1990) Biotechnology 8:736-740 (rice); Klein, et al., (1988) Proc. Natl. Acad. Sci. USA 85:4305-4309 (maize); Klein, et al., (1988) Biotechnology 6:559-563 (maize); U.S. Pat. Nos. 5,240,855; 5,322,783 and 5,324,646; Klein, et al., (1988) Plant Physiol. 91:440-444 (maize); Fromm, et al., (1990) Biotechnology 8:833-839 (maize); Hooykaas-Van Slogteren, et al., (1984) Nature (London) 311:763-764; U.S. Pat. No. 5,736,369 (cereals); Bytebier, et al., (1987) Proc. Natl. Acad. Sci. USA 84:5345-5349 (Liliaceae); De Wet, et al., (1985) in The Experimental Manipulation of Ovule Tissues, ed. Chapman, et al., (Longman, New York), pp. 197-209 (pollen); Kaeppler, et al., (1990) Plant Cell Reports 9:415-418 and Kaeppler, et al., (1992) Theor. Appl. Genet. 84:560-566 (whisker-mediated transformation); D'Halluin, et al., (1992) Plant Cell 4:1495-1505 (electroporation); Li, et al., (1993) Plant Cell Reports 12:250-255 and Christou and Ford, (1995) Annals of Botany 75:407-413 (rice); Osjoda, et al., (1996) Nature Biotechnology 14:745-750 (maize via Agrobacterium tumefaciens), all of which are herein incorporated by reference in their entirety. Methods and compositions for rapid plant transformation are also found in U.S. 2017/0121722, herein incorporated in its entirety by reference. Vectors useful in plant transformation are found in U.S. patent application Ser. No. 15/765,521, herein incorporated by reference in its entirety.

[0202] In specific aspects, the DNA constructs comprising the promoter sequences of the disclosure can be provided to a plant using a variety of transient transformation methods. Such transient transformation methods include, but are not limited to, viral vector systems and the precipitation of the polynucleotide in a manner that precludes subsequent release of the DNA. Thus, transcription from the particle-bound DNA can occur, but the frequency with which it is released to become integrated into the genome is greatly reduced. Such methods include the use of particles coated with polyethylimine (PEI; Sigma # P3143).

[0203] In other aspects, the polynucleotide of the disclosure may be introduced into plants by contacting plants with a virus or viral nucleic acids. Generally, such methods involve incorporating a nucleotide construct of the disclosure within a viral DNA or RNA molecule. Methods for introducing polynucleotides into plants and expressing a protein encoded therein, involving viral DNA or RNA molecules, are known in the art. See, for example, U.S. Pat. Nos. 5,889,191, 5,889,190, 5,866,785, 5,589,367, 5,316,931 and Porta, et al., (1996) Molecular Biotechnology 5:209-221, herein incorporated by reference in their entirety.

[0204] Methods are known in the art for the targeted insertion of a polynucleotide at a specific location in the plant genome. In one aspect, the insertion of the polynucleotide at a desired genomic location is achieved using a site-specific recombination system. See, for example, WO99/25821, WO99/25854, WO99/25840, WO99/25855 and WO99/25853, all of which are herein incorporated by reference in their entirety. Briefly, the polynucleotide of the disclosure can be contained in transfer cassette flanked by two non-identical recombination sites. The transfer cassette is introduced into a plant having stably incorporated into its genome a target site which is flanked by two non-identical recombination sites that correspond to the sites of the transfer cassette. An appropriate recombinase is provided and the transfer cassette is integrated at the target site. The polynucleotide of interest is thereby integrated at a specific chromosomal position in the plant genome.

[0205] The cells that have been transformed may be grown into plants in accordance with conventional ways. See, for example, McCormick, et al., (1986) Plant Cell Reports 5:81-84, herein incorporated by reference in its entirety. These plants may then be grown, and either pollinated with the same transformed strain or different strains, and the resulting progeny having expression of the desired phenotypic characteristic identified. Two or more generations may be grown to ensure that expression of the desired phenotypic characteristic is stably maintained and inherited and then seeds harvested to ensure expression of the desired phenotypic characteristic has been achieved. In this manner, the present disclosure provides transformed seed (also referred to as “transgenic seed”) having a nucleotide construct of the disclosure, for example, an expression cassette of the disclosure, stably incorporated into its genome.

[0206] There are a variety of methods for the regeneration of plants from plant tissue. The particular method of regeneration will depend on the starting plant tissue and the particular plant species to be regenerated. The regeneration, development and cultivation of plants from single plant protoplast transformants or from various transformed explants is well known in the art (Weissbach and Weissbach, (1988) In: Methods for Plant Molecular Biology, (Eds.), Academic Press, Inc., San Diego, Calif., herein incorporated by reference in its entirety). This regeneration and growth process typically includes the steps of selection of transformed cells, culturing those individualized cells through the usual stages of embryonic development through the rooted plantlet stage. Transgenic embryos and seeds are similarly regenerated. The resulting transgenic rooted shoots are thereafter planted in an appropriate plant growth medium such as soil. Preferably, the regenerated plants are self-pollinated to provide homozygous transgenic plants. Otherwise, pollen obtained from the regenerated plants is crossed to seed-grown plants of agronomically important lines. Conversely, pollen from plants of these important lines is used to pollinate regenerated plants. A transgenic plant of the aspects containing a desired polynucleotide is cultivated using methods well known to one skilled in the art.

[0207] The aspects provide compositions for screening compounds that modulate expression within plants. The vectors, cells and plants can be used for screening candidate molecules for agonists and antagonists of the regulatory sequences disclosed herein. For example, a reporter gene can be operably linked to a regulatory sequence and expressed as a transgene in a plant. Compounds to be tested are added and reporter gene expression is measured to determine the effect on promoter activity.

[0208] In an aspect, the disclosed methods and compositions can be used to introduce into somatic embryos with increased efficiency and speed polynucleotides useful to target a specific site for modification in the genome of a plant derived from the somatic embryo. Site specific modifications that can be introduced with the disclosed methods and compositions include those produced using any method for introducing site specific modification, including, but not limited to, through the use of gene repair oligonucleotides (e.g. US Publication 2013/0019349), or through the use of double-stranded break technologies such as TALENs, meganucleases, zinc finger nucleases, CRISPR-Cas, and the like. For example, the disclosed methods and compositions can be used to introduce a CRISPR-Cas system into a plant cell or plant, for the purpose of genome modification of a target sequence in the genome of a plant or plant cell, for selecting plants, for deleting a base or a sequence, for gene editing, and for inserting a polynucleotide of interest into the genome of a plant or plant cell. Thus, the disclosed methods and compositions can be used together with a CRISPR-Cas system to provide for an effective system for modifying or altering target sites and nucleotides of interest within the genome of a plant, plant cell or seed. The Cas endonuclease gene is a plant optimized Cas9 endonuclease, wherein the plant optimized Cas9 endonuclease is capable of binding to and creating a double strand break in a genomic target sequence the plant genome.

[0209] The Cas endonuclease is guided by the guide nucleotide to recognize and optionally introduce a double strand break at a specific target site into the genome of a cell. The CRISPR-Cas system provides for an effective system for modifying target sites within the genome of a plant, plant cell or seed. Further provided are methods and compositions employing a guide polynucleotide/Cas endonuclease system to provide an effective system for modifying target sites within the genome of a cell and for editing a nucleotide sequence in the genome of a cell. Once a genomic target site is identified, a variety of methods can be employed to further modify the target sites such that they contain a variety of polynucleotides of interest. The disclosed compositions and methods can be used to introduce a CRISPR-Cas system for editing a nucleotide sequence in the genome of a cell. The nucleotide sequence to be edited (the nucleotide sequence of interest) can be located within or outside a target site that is recognized by a Cas endonuclease.

[0210] CRISPR loci (Clustered Regularly Interspaced Short Palindromic Repeats) (also known as SPIDRs-SPacer Interspersed Direct Repeats) constitute a family of recently described DNA loci. CRISPR loci consist of short and highly conserved DNA repeats (typically 24 to 40 bp, repeated from 1 to 140 times—also referred to as CRISPR-repeats) which are partially palindromic. The repeated sequences (usually specific to a species) are interspaced by variable sequences of constant length (typically 20 to 58 by depending on the CRISPR locus (WO2007/025097 published Mar. 1, 2007).

[0211] CRISPR loci were first recognized in E. coli (Ishino et al. (1987) J. Bacterial. 169:5429-5433; Nakata et al. (1989) J. Bacterial. 171:3553-3556). Similar interspersed short sequence repeats have been identified in Haloferax mediterranei, Streptococcus pyogenes, Anabaena, and Mycobacterium tuberculosis (Groenen et al. (1993) Mol. Microbiol. 10:1057-1065; Hoe et al. (1999) Emerg. Infect. Dis. 5:254-263; Masepohl et al. (1996) Biochim. Biophys. Acta 1307:26-30; Mojica et al. (1995) Mol. Microbiol. 17:85-93). The CRISPR loci differ from other SSRs by the structure of the repeats, which have been termed short regularly spaced repeats (SRSRs) (Janssen et al. (2002) OMICS J. Integ. Biol. 6:23-33; Mojica et al. (2000) Mol. Microbiol. 36:244-246). The repeats are short elements that occur in clusters, that are always regularly spaced by variable sequences of constant length (Mojica et al. (2000) Mol. Microbiol. 36:244-246).

[0212] Cas gene includes a gene that is generally coupled, associated or close to or in the vicinity of flanking CRISPR loci. The terms “Cas gene” and “CRISPR-associated (Cas) gene” are used interchangeably herein. A comprehensive review of the Cas protein family is presented in Haft et al. (2005) Computational Biology, PLoS Comput Biol 1 (6): e60. doi:10.1371/journal.pcbi.0010060.

[0213] In addition to the four initially described gene families, an additional 41 CRISPR-associated (Cas) gene families have been described in WO/2015/026883, which is incorporated herein by reference. This reference shows that CRISPR systems belong to different classes, with different repeat patterns, sets of genes, and species ranges. The number of Cas genes at a given CRISPR locus can vary between species. Cas endonuclease relates to a Cas protein encoded by a Cas gene, wherein the Cas protein is capable of introducing a double strand break into a DNA target sequence. The Cas endonuclease is guided by the guide polynucleotide to recognize and optionally introduce a double strand break at a specific target site into the genome of a cell. As used herein, the term “guide polynucleotide/Cas endonuclease system” includes a complex of a Cas endonuclease and a guide polynucleotide that is capable of introducing a double strand break into a DNA target sequence. The Cas endonuclease unwinds the DNA duplex in close proximity of the genomic target site and cleaves both DNA strands upon recognition of a target sequence by a guide nucleotide, but only if the correct protospacer-adjacent motif (PAM) is approximately oriented at the 3′ end of the target sequence (see FIG. 2A and FIG. 2B of WO/2015/026883, published Feb. 26, 2015).

[0214] In an aspect, the Cas endonuclease gene is a Cas9 endonuclease, such as, but not limited to, Cas9 genes listed in SEQ ID NOs: 462, 474, 489, 494, 499, 505, and 518 of WO2007/025097, published Mar. 1, 2007, and incorporated herein by reference. In another aspect, the Cas endonuclease gene is plant, maize or soybean optimized Cas9 endonuclease, such as, but not limited to those shown in FIG. 1A of WO/2015/026883. In another aspect, the Cas endonuclease gene is operably linked to a SV40 nuclear targeting signal upstream of the Cas codon region and a bipartite VirD2 nuclear localization signal (Tinland et al. (1992) Proc. Natl. Acad. Sci. USA 89:7442-6) downstream of the Cas codon region.

[0215] In an aspect, the Cas endonuclease gene is a Cas9 endonuclease gene of SEQ ID NO:1, 124, 212, 213, 214, 215, 216, 193 or nucleotides 2037-6329 of SEQ ID NO:5, or any functional fragment or variant thereof, of WO/2015/026883.

[0216] As related to the Cas endonuclease, the terms “functional fragment,” “fragment that is functionally equivalent,” and “functionally equivalent fragment” are used interchangeably herein. These terms refer to a portion or subsequence of the Cas endonuclease sequence of the present disclosure in which the ability to create a double-strand break is retained.

[0217] As related to the Cas endonuclease, the terms “functional variant,” “variant that is functionally equivalent” and “functionally equivalent variant” are used interchangeably herein. These terms refer to a variant of the Cas endonuclease of the present disclosure in which the ability to create a double-strand break is retained. Fragments and variants can be obtained via methods such as site-directed mutagenesis and synthetic construction.

[0218] In an aspect, the Cas endonuclease gene is a plant codon optimized Streptococcus pyogenes Cas9 gene that can recognize any genomic sequence of the form N(12-30)NGG can in principle be targeted.

[0219] Endonucleases are enzymes that cleave the phosphodiester bond within a polynucleotide chain, and include restriction endonucleases that cleave DNA at specific sites without damaging the bases. Restriction endonucleases include Type I, Type II, Type III, and Type IV endonucleases, which further include subtypes. In the Type I and Type III systems, both the methylase and restriction activities are contained in a single complex. Endonucleases also include meganucleases, also known as homing endonucleases (HEases), which like restriction endonucleases, bind and cut at a specific recognition site, however the recognition sites for meganucleases are typically longer, about 18 bp or more (Patent application PCT/US 12/30061 filed on Mar. 22, 2012). Meganucleases have been classified into four families based on conserved sequence motifs, the families are the LAGLIDADG, GIY-YIG, H-N-H, and His-Cys box families. These motifs participate in the coordination of metal ions and hydrolysis of phosphodiester bonds. Meganucleases are notable for their long recognition sites, and for tolerating some sequence polymorphisms in their DNA substrates. The naming convention for meganuclease is similar to the convention for other restriction endonuclease. Meganucleases are also characterized by prefix F-, I-, or PI-for enzymes encoded by free-standing ORFs, introns, and inteins, respectively. One step in the recombination process involves polynucleotide cleavage at or near the recognition site. This cleaving activity can be used to produce a double-strand break. For reviews of site-specific recombinases and their recognition sites, see, Sauer (1994) Curr Op Biotechnol 5:521-7; and Sadowski (1993) FASEB 7:760-7. In some examples the recombinase is from the Integrase or Resolvase families. TAL effector nucleases are a new class of sequence-specific nucleases that can be used to make double-strand breaks at specific target sequences in the genome of a plant or other organism. (Miller, et al. (2011) Nature Biotechnology 29:143-148). Zinc finger nucleases (ZFNs) are engineered double-strand break inducing agents comprised of a zinc finger DNA binding domain and a double-strand-break-inducing agent domain. Recognition site specificity is conferred by the zinc finger domain, which typically comprising two, three, or four zinc fingers, for example having a C2H2 structure, however other zinc finger structures are known and have been engineered. Zinc finger domains are amenable for designing polypeptides which specifically bind a selected polynucleotide recognition sequence. ZFNs include an engineered DNA-binding zinc finger domain linked to a nonspecific endonuclease domain, for example nuclease domain from a Type Ms endonuclease such as Fokl. Additional functionalities can be fused to the zinc-finger binding domain, including transcriptional activator domains, transcription repressor domains, and methylases. In some examples, dimerization of nuclease domain is required for cleavage activity. Each zinc finger recognizes three consecutive base pairs in the target DNA. For example, a 3 finger domain recognized a sequence of 9 contiguous nucleotides, with a dimerization requirement of the nuclease, two sets of zinc finger triplets are used to bind an 18 nucleotide recognition sequence.

[0220] Bacteria and archaea have evolved adaptive immune defenses termed clustered regularly interspaced short palindromic repeats (CRISPR)/CRISPR-associated (Cas) systems that use short RNA to direct degradation of foreign nucleic acids ((WO2007/025097 published Mar. 1, 2007). The type II CRISPR/Cas system from bacteria employs a crRNA and tracrRNA to guide the Cas endonuclease to its DNA target. The crRNA (CRISPR RNA) contains the region complementary to one strand of the double strand DNA target and base pairs with the tracrRNA (trans-activating CRISPR RNA) forming a RNA duplex that directs the Cas endonuclease to cleave the DNA target.

[0221] As used herein, the term “guide nucleotide” relates to a synthetic fusion of two RNA molecules, a crRNA (CRISPR RNA) comprising a variable targeting domain, and a tracrRNA. In an aspect, the guide nucleotide comprises a variable targeting domain of 12 to 30 nucleotide sequences and a RNA fragment that can interact with a Cas endonuclease.

[0222] As used herein, the term “guide polynucleotide” relates to a polynucleotide sequence that can form a complex with a Cas endonuclease and enables the Cas endonuclease to recognize and optionally cleave a DNA target site. The guide polynucleotide can be a single molecule or a double molecule. The guide polynucleotide sequence can be a RNA sequence, a DNA sequence, or a combination thereof (a RNA-DNA combination sequence). Optionally, the guide polynucleotide can comprise at least one nucleotide, phosphodiester bond or linkage modification such as, but not limited, to Locked Nucleic Acid (LNA), 5-methyl dC, 2,6-Diaminopurine, 2′-Fluoro A, 2′-Fluoro U, 2′-O-Methyl RNA, phosphorothioate bond, linkage to a cholesterol molecule, linkage to a polyethylene glycol molecule, linkage to a spacer 18 (hexaethylene glycol chain) molecule, or 5′ to 3′ covalent linkage resulting in circularization. A guide polynucleotide that solely comprises ribonucleic acids is also referred to as a “guide nucleotide”.

[0223] The guide polynucleotide can be a double molecule (also referred to as duplex guide polynucleotide) comprising a first nucleotide sequence domain (referred to as Variable Targeting domain or VT domain) that is complementary to a nucleotide sequence in a target DNA and a second nucleotide sequence domain (referred to as Cas endonuclease recognition domain or CER domain) that interacts with a Cas endonuclease polypeptide. The CER domain of the double molecule guide polynucleotide comprises two separate molecules that are hybridized along a region of complementarity. The two separate molecules can be RNA, DNA, and/or RNA-DNA-combination sequences. In an aspect, the first molecule of the duplex guide polynucleotide comprising a VT domain linked to a CER domain is referred to as “crDNA” (when composed of a contiguous stretch of DNA nucleotides) or “crRNA” (when composed of a contiguous stretch of RNA nucleotides), or “crDNA-RNA” (when composed of a combination of DNA and RNA nucleotides). The crNucleotide can comprise a fragment of the cRNA naturally occurring in Bacteria and Archaea. In an aspect, the size of the fragment of the cRNA naturally occurring in Bacteria and Archaea that is present in a crNucleotide disclosed herein can range from, but is not limited to, 2, 3, 4, 5, 6, 7, 8, 9,10, 11, 12, 13, 14, 15, 16, 17, 18, 19, 20 or more nucleotides.

[0224] In an aspect, the second molecule of the duplex guide polynucleotide comprising a CER domain is referred to as “tracrRNA” (when composed of a contiguous stretch of RNA nucleotides) or “tracrDNA” (when composed of a contiguous stretch of DNA nucleotides) or “tracrDNA-RNA” (when composed of a combination of DNA and RNA nucleotides. In an aspect, the RNA that guides the RNA Cas9 endonuclease complex, is a duplexed RNA comprising a duplex crRNA-tracrRNA.

[0225] The guide polynucleotide can also be a single molecule comprising a first nucleotide sequence domain (referred to as Variable Targeting domain or VT domain) that is complementary to a nucleotide sequence in a target DNA and a second nucleotide domain (referred to as Cas endonuclease recognition domain or CER domain) that interacts with a Cas endonuclease polypeptide. By “domain” it is meant a contiguous stretch of nucleotides that can be RNA, DNA, and/or RNA-DNA-combination sequence. The VT domain and/or the CER domain of a single guide polynucleotide can comprise a RNA sequence, a DNA sequence, or a RNA-DNA-combination sequence. In an aspect, the single guide polynucleotide comprises a crNucleotide (comprising a VT domain linked to a CER domain) linked to a tracrNucleotide (comprising a CER domain), wherein the linkage is a nucleotide sequence comprising a RNA sequence, a DNA sequence, or a RNA-DNA combination sequence. The single guide polynucleotide being comprised of sequences from the crNucleotide and tracrNucleotide may be referred to as “single guide nucleotide” (when composed of a contiguous stretch of RNA nucleotides) or “single guide DNA” (when composed of a contiguous stretch of DNA nucleotides) or “single guide nucleotide-DNA” (when composed of a combination of RNA and DNA nucleotides). In an aspect of the disclosure, the single guide nucleotide comprises a cRNA or cRNA fragment and a tracrRNA or tracrRNA fragment of the type II CRISPR/Cas system that can form a complex with a type II Cas endonuclease, wherein the guide nucleotide Cas endonuclease complex can direct the Cas endonuclease to a plant genomic target site, enabling the Cas endonuclease to introduce a double strand break into the genomic target site. One aspect of using a single guide polynucleotide versus a duplex guide polynucleotide is that only one expression cassette needs to be made to express the single guide polynucleotide.

[0226] The term “variable targeting domain” or “VT domain” is used interchangeably herein and includes a nucleotide sequence that is complementary to one strand (nucleotide sequence) of a double strand DNA target site. The % complementation between the first nucleotide sequence domain (VT domain) and the target sequence can be at least 50%, 51%, 52%, 53%, 54%, 55%, 56%, 57%, 58%, 59%, 60%, 61%, 62%, 63%, 63%, 65%, 66%, 67%, 68%, 69%, 70%, 71%, 72%, 73%, 74%, 75%, 76%, 77%, 78%, 79%, 80%, 81%, 82%, 83%, 84%, 85%, 86%, 87%, 88%, 89%, 90%, 91%, 92%, 93%, 94%, 95%, 96%, 97%, 98%, 99% or 100%. The variable target domain can be at least 12, 13, 14, 15, 16, 17, 18, 19, 20, 21, 22, 23, 24, 25, 26, 27, 28, 29 or 30 nucleotides in length. In an aspect, the variable targeting domain comprises a contiguous stretch of 12 to 30 nucleotides. The variable targeting domain can be composed of a DNA sequence, a RNA sequence, a modified DNA sequence, a modified RNA sequence, or any combination thereof.

[0227] The term “Cas endonuclease recognition domain” or “CER domain” of a guide polynucleotide is used interchangeably herein and includes a nucleotide sequence (such as a second nucleotide sequence domain of a guide polynucleotide), that interacts with a Cas endonuclease polypeptide. The CER domain can be composed of a DNA sequence, a RNA sequence, a modified DNA sequence, a modified RNA sequence (see for example modifications described herein), or any combination thereof.

[0228] The nucleotide sequence linking the crNucleotide and the tracrNucleotide of a single guide polynucleotide can comprise a RNA sequence, a DNA sequence, or a RNA-DNA combination sequence. In an aspect, the nucleotide sequence linking the crNucleotide and the tracrNucleotide of a single guide polynucleotide can be at least 3, 4, 5, 6, 7, 8, 9, 10, 11, 12, 13, 14, 15, 16, 17, 18, 19, 20, 21, 22, 23, 24, 25, 26, 27, 28, 29, 30, 31, 32, 33, 34, 35, 36, 37, 38, 39, 40, 41, 42, 43, 44, 45, 46, 47, 48, 49, 50, 51, 52, 53, 54, 55, 56, 57, 58, 59, 60, 61, 62, 63, 64, 65, 66, 67, 68, 69, 70, 71, 72, 73, 74, 75, 76, 77, 78, 78, 79, 80, 81, 82, 83, 84, 85, 86, 87, 88, 89, 90, 91, 92, 93, 94, 95, 96, 97, 98, 99 or 100 nucleotides in length. In another aspect, the nucleotide sequence linking the crNucleotide and the tracrNucleotide of a single guide polynucleotide can comprise a tetraloop sequence, such as, but not limiting to a GAAA tetraloop sequence.

[0229] Nucleotide sequence modification of the guide polynucleotide, VT domain and/or CER domain can be selected from, but not limited to, the group consisting of a 5′ cap, a 3′ polyadenylated tail, a riboswitch sequence, a stability control sequence, a sequence that forms a dsRNA duplex, a modification or sequence that targets the guide poly nucleotide to a subcellular location, a modification or sequence that provides for tracking, a modification or sequence that provides a binding site for proteins, a Locked Nucleic Acid (LNA), a 5-methyl dC nucleotide, a 2,6-Diaminopurine nucleotide, a 2′-Fluoro A nucleotide, a 2′-Fluoro U nucleotide; a 2′-O-Methyl RNA nucleotide, a phosphorothioate bond, linkage to a cholesterol molecule, linkage to a polyethylene glycol molecule, linkage to a spacer 18 molecule, a 5′ to 3′ covalent linkage, or any combination thereof. These modifications can result in at least one additional beneficial feature, wherein the additional beneficial feature is selected from the group of a modified or regulated stability, a subcellular targeting, tracking, a fluorescent label, a binding site for a protein or protein complex, modified binding affinity to complementary target sequence, modified resistance to cellular degradation, and increased cellular permeability.

[0230] In an aspect, the guide nucleotide and Cas endonuclease are capable of forming a complex that enables the Cas endonuclease to introduce a double strand break at a DNA target site.

[0231] In an aspect of the disclosure the variable target domain is 12, 13, 14, 15, 16, 17, 18, 19, 20, 21, 22, 23, 24, 25, 26, 27, 28, 29 or 30 nucleotides in length.

[0232] In an aspect of the disclosure, the guide nucleotide comprises a cRNA (or cRNA fragment) and a tracrRNA (or tracrRNA fragment) of the type II CRISPR/Cas system that can form a complex with a type II Cas endonuclease, wherein the guide nucleotide Cas endonuclease complex can direct the Cas endonuclease to a plant genomic target site, enabling the Cas endonuclease to introduce a double strand break into the genomic target site. The guide nucleotide can be introduced into a plant or plant cell directly using any method known in the art such as, but not limited to, particle bombardment or topical applications.

[0233] In an aspect, the guide nucleotide can be introduced indirectly by introducing a recombinant DNA molecule comprising the corresponding guide DNA sequence operably linked to a plant specific promoter that is capable of transcribing the guide nucleotide in the plant cell. The term “corresponding guide DNA” includes a DNA molecule that is identical to the RNA molecule but has a “T” substituted for each “U” of the RNA molecule.

[0234] In an aspect, the guide nucleotide is introduced via particle bombardment or using the disclosed methods and compositions for Agrobacterium transformation of a recombinant DNA construct comprising the corresponding guide DNA operably linked to a plant U6 polymerase III promoter.

[0235] In an aspect, the RNA that guides the RNA Cas9 endonuclease complex, is a duplexed RNA comprising a duplex crRNA-tracrRNA. One advantage of using a guide nucleotide versus a duplexed crRNA-tracrRNA is that only one expression cassette needs to be made to express the fused guide nucleotide.

[0236] The terms “target site,” “target sequence,” “target DNA,” “target locus,” “genomic target site,” “genomic target sequence,” and “genomic target locus” are used interchangeably herein and refer to a polynucleotide sequence in the genome (including choloroplastic and mitochondrial DNA) of a plant cell at which a double-strand break is induced in the plant cell genome by a Cas endonuclease. The target site can be an endogenous site in the plant genome, or alternatively, the target site can be heterologous to the plant and thereby not be naturally occurring in the genome, or the target site can be found in a heterologous genomic location compared to where it occurs in nature.

[0237] As used herein, terms “endogenous target sequence” and “native target sequence” are used interchangeably herein to refer to a target sequence that is endogenous or native to the genome of a plant and is at the endogenous or native position of that target sequence in the genome of the plant. In an aspect, the target site can be similar to a DNA recognition site or target site that that is specifically recognized and/or bound by a double-strand break inducing agent such as a LIG3-4 endonuclease (US patent publication 2009-0133152 A1 (published May 21, 2009) or a MS26++meganuclease (U.S. patent application Ser. No. 13/526,912 filed Jun. 19, 2012).

[0238] An “artificial target site” or “artificial target sequence” are used interchangeably herein and refer to a target sequence that has been introduced into the genome of a plant. Such an artificial target sequence can be identical in sequence to an endogenous or native target sequence in the genome of a plant but be located in a different position (i.e., a non-endogenous or non-native position) in the genome of a plant.

[0239] An “altered target site,” “altered target sequence” “modified target site,” and “modified target sequence” are used interchangeably herein and refer to a target sequence as disclosed herein that comprises at least one alteration when compared to non-altered target sequence. Such “alterations” include, for example: (i) replacement of at least one nucleotide, (ii) a deletion of at least one nucleotide, (iii) an insertion of at least one nucleotide, or (iv) any combination of (i)-(iii).

[0240] A summary of SEQ ID NOS: 1-189 is presented in Table 1.

TABLE 1
Summary of SEQ ID NOS: 1-189.

| | Polynucleotide | | |
|---|---|---|---|
| SEQ | (DNA) or | | |
| ID | Polypeptide | | |
| NO. | (PRT) | Name | Description |
| 1 | DNA | GM-HBSTART3 | Glycine max HBSTART3 |
| | | | (Homeodomain StAR-related lipid |
| | | | transfer3) promoter sequence |
| 2 | DNA | GM-HBSTART3 | Glycine max HBSTART3 |
| | | (TRUNCATED) | (Homeodomain StAR-related lipid |
| | | | transfer3) promoter sequence |
| | | | (TRUNCATED) |
| 3 | DNA | AT-ML1 | Arabidopsis thaliana ML1 (MERISTEM |
| | | | LAYER1) promoter sequence |
| 4 | DNA | GM-ML1-Like | Glycine max ML1-Like (MERISTEM |
| | | | LAYER1-Like) promoter sequence |
| 5 | DNA | GM-ML1-Like | Glycine max ML1-Like (MERISTEM |
| | | (TRUNCATED) | LAYER1-Like) promoter sequence |
| | | | (TRUNCATED) |
| 6 | DNA | ZM-HBSTART3 | Zea mays HBSTART3 (Homeodomain |
| | | | StAR-related lipid transfer3) promoter |
| | | | sequence |
| 7 | DNA | OS-HBSTART3 | Oryza sativa HBSTART3 |
| | | | (Homeodomain StAR-related lipid |
| | | | transfer3) promoter sequence |
| 8 | DNA | AT-PDF1 | Arabidopsis thaliana PDF1 |
| | | | (PROTODERMAL FACTOR1) |
| | | | promoter sequence |
| 9 | DNA | GM-PDF1 | Glycine max PDF1 (PROTODERMAL |
| | | | FACTOR1) promoter sequence |
| 10 | DNA | GM-PDF1 | Glycine max PDF1 (PROTODERMAL |
| | | (TRUNCATED) | FACTOR1) promoter sequence |
| | | | (TRUNCATED) |
| 11 | DNA | SB-PDF1 | Sorghum bicolor PDF1 |
| | | | (PROTODERMAL FACTOR1) |
| | | | promoter sequence |
| 12 | DNA | OS-PDF1 | Oryza sativa PDF1 (PROTODERMAL |
| | | | FACTOR1) promoter sequence |
| 13 | DNA | OS-PDF1 | Oryza sativa PDF1 (PROTODERMAL |
| | | (TRUNCATED) | FACTOR1) promoter sequence |
| | | | (TRUNCATED) |
| 14 | DNA | PT-PDF1 | Populus trichocarpa PDF1 |
| | | | (PROTODERMAL FACTOR1) |
| | | | promoter sequence |
| 15 | DNA | PT-PDF1 | Populus trichocarpa PDF1 |
| | | (TRUNCATED) | (PROTODERMAL FACTOR1) |
| | | | promoter sequence (TRUNCATED) |
| 16 | DNA | SI-PDF1 | Setaria italica PDF1 (PROTODERMAL |
| | | | FACTOR1) promoter sequence |
| 17 | DNA | SI-PDF1 | Setaria italica PDF1 (PROTODERMAL |
| | | (TRUNCATED) | FACTOR1) promoter sequence |
| | | | (TRUNCATED) |
| 18 | DNA | AT-PDF2 | Arabidopsis thaliana PDF2 |
| | | | (PROTODERMAL FACTOR2) |
| | | | promoter sequence |
| 19 | DNA | GM-PDF2 | Glycine max PDF2 (PROTODERMAL |
| | | | FACTOR2) promoter sequence |
| 20 | DNA | GM-PDF2 | Glycine max PDF2 (PROTODERMAL |
| | | (TRUNCATED) | FACTOR2) promoter sequence |
| | | | (TRUNCATED) |
| 21 | DNA | ZM-GL1 | Zea mays GL1 (GLABROUS1) promoter |
| | | | sequence |
| 22 | DNA | AT-PDF2a | Arabidopsis thaliana PDF2a |
| | | | (PROTODERMAL FACTOR2a) |
| | | | promoter sequence |
| 23 | DNA | AT-PDF2a | Arabidopsis thaliana PDF2a |
| | | (TRUNCATED) | (PROTODERMAL FACTOR2a) |
| | | | promoter sequence (TRUNCATED) |
| 24 | DNA | GM-PDF2a | Glycine max PDF2a (PROTODERMAL |
| | | | FACTOR2a) promoter sequence |
| 25 | DNA | GM-PDF2a | Glycine max PDF2a (PROTODERMAL |
| | | (TRUNCATED) | FACTOR2a) promoter sequence |
| | | | (TRUNCATED) |
| 26 | DNA | OS-PDF2 | Oryza sativa PDF2 (PROTODERMAL |
| | | | FACTOR2) promoter sequence |
| 27 | DNA | OS-PDF2 | Oryza sativa PDF2 (PROTODERMAL |
| | | (TRUNCATED) | FACTOR2) promoter sequence |
| | | | (TRUNCATED) |
| 28 | DNA | PT-PDF2 | Populus trichocarpa PDF2 |
| | | | (PROTODERMAL FACTOR2) |
| | | | promoter sequence) |
| 29 | DNA | PT-PDF2 | Populus trichocarpa PDF2 |
| | | (TRUNCATED) | (PROTODERMAL FACTOR2) |
| | | | promoter sequence (TRUNCATED) |
| 30 | DNA | VV-PDF2 | Vitis vinifera PDF2 (PROTODERMAL |
| | | | FACTOR2) promoter sequence |
| 31 | DNA | VV-PDF2 | Vitis vinifera PDF2 (PROTODERMAL |
| | | (TRUNCATED) | FACTOR2) promoter sequence |
| | | | (TRUNCATED) |
| 32 | DNA | ZM-PDF2 | Zea mays PDF2 (PROTODERMAL |
| | | | FACTOR2) promoter sequence |
| 33 | DNA | SI-PDF2 | Setaria italica PDF2 (PROTODERMAL |
| | | | FACTOR2) promoter sequence |
| 34 | DNA | SI-PDF2 | Setaria italica PDF2 (PROTODERMAL |
| | | (TRUNCATED) | FACTOR2) promoter |
| | | | sequence(TRUNCATED) |
| 35 | DNA | VV-PDF2a | Vitis vinifera PDF2a (PROTODERMAL |
| | | | FACTOR2a) promoter sequence |
| 36 | DNA | PT-PDF2a | Populus trichocarpa PDF2a |
| | | | (PROTODERMAL FACTOR2a) |
| | | | promoter sequence |
| 37 | DNA | PT-PDF2a | Populus trichocarpa PDF2a |
| | | (TRUNCATED) | (PROTODERMAL FACTOR2a) |
| | | | promoter sequence (TRUNCATED) |
| 38 | DNA | MT-PDF2 | Medicago trunculata PDF2 |
| | | | (PROTODERMAL FACTOR2) |
| | | | promoter sequence |
| 39 | DNA | MT-PDF2 | Medicago trunculata PDF2 |
| | | (TRUNCATED) | (PROTODERMAL FACTOR2) |
| | | | promoter sequence (TRUNCATED) |
| 40 | DNA | AT-HDG2 | Arabidopsis thaliana HDG2 |
| | | | (HOMEODOMAIN GLABROUS2) |
| | | | promoter sequence |
| 41 | DNA | GM-HDG2 | Glycine max HDG2 (HOMEODOMAIN |
| | | | GLABROUS2) promoter sequence |
| 42 | DNA | GM-HDG2 | Glycine max HDG2 (HOMEODOMAIN |
| | | (TRUNCATED) | GLABROUS2) promoter sequence |
| | | | (TRUNCATED) |
| 43 | DNA | SB-HDG2 | Sorghum bicolor HDG2 |
| | | | (HOMEODOMAIN GLABROUS2) |
| | | | promoter sequence |
| 44 | DNA | SB-HDG2 | Sorghum bicolor HDG2 |
| | | (TRUNCATED) | (HOMEODOMAIN GLABROUS2) |
| | | | promoter sequence (TRUNCATED) |
| 45 | DNA | AT-CER6 | Arabidopsis thaliana CER6 |
| | | | (ECERIFERUM6) promoter sequence |
| 46 | DNA | AT-CER60 | Arabidopsis thaliana CER60 |
| | | | (ECERIFERUM60) promoter sequence |
| 47 | DNA | AT-CER60 | Arabidopsis thaliana CER60 |
| | | (TRUNCATED) | (ECERIFERUM60) promoter sequence |
| | | | (TRUNCATED) |
| 48 | DNA | GM-CER6 | Glycine max CER6 (ECERIFERUM6) |
| | | | promoter sequence |
| 49 | DNA | GM-CER6 | Glycine max CER6 (ECERIFERUM6) |
| | | (TRUNCATED) | promoter sequence (TRUNCATED) |
| 50 | DNA | PT-CER6 | Populus trichocarpa CER6 |
| | | | (ECERIFERUM6) promoter sequence |
| 51 | DNA | PT-CER6 | Populus trichocarpa CER6 |
| | | (TRUNCATED) | (ECERIFERUM6) promoter sequence |
| | | | (TRUNCATED) |
| 52 | DNA | VV-CER6 | Vitis vinifera CER6 (ECERIFERUM6) |
| | | | promoter sequence |
| 53 | DNA | VV-CER6 | Vitis vinifera CER6 (ECERIFERUM6) |
| | | (TRUNCATED) | promoter sequence (TRUNCATED) |
| 54 | DNA | SB-CER6 | Sorghum bicolor CER6 |
| | | | (ECERIFERUM6) promoter sequence |
| 55 | DNA | ZM-CER6 | Zea mays CER6 (ECERIFERUM6) |
| | | | promoter sequence |
| 56 | DNA | SI-CER6 | Setaria italica CER6 (ECERIFERUM6) |
| | | | promoter sequence |
| 57 | DNA | SI-CER6 | Setaria italica CER6 (ECERIFERUM6) |
| | | (TRUNCATED) | promoter sequence (TRUNCATED) |
| 58 | DNA | OS-CER6 | Oryza sativa CER6 (ECERIFERUM6) |
| | | | promoter sequence |
| 59 | DNA | OS-CER6 | Oryza sativa CER6 (ECERIFERUM6) |
| | | (TRUNCATED) | promoter sequence (TRUNCATED) |
| 60 | DNA | AT-WUS | Arabidopsis thaliana WUS coding |
| | | | sequence |
| 61 | PRT | AT-WUS | Arabidopsis thaliana WUS protein |
| | | | sequence |
| 62 | DNA | LJ-WUS | Lotus japonicus WUS coding sequence |
| 63 | PRT | LJ-WUS | Lotus japonicus WUS protein sequence |
| 64 | DNA | GM-WUS | Glycine max WUS coding sequence |
| 65 | PRT | GM-WUS | Glycine max WUS protein sequence |
| 66 | DNA | CS-WUS | Camelina sativa WUS coding sequence |
| 67 | PRT | CS-WUS | Camelina sativa WUS protein sequence |
| 68 | DNA | CR-WUS | Capsella rubella WUS coding sequence |
| 69 | PRT | CR-WUS | Capsella rubella WUS protein sequence |
| 70 | DNA | AA-WUS | Arabis alpina WUS coding sequence |
| 71 | PRT | AA-WUS | Arabis alpina WUS protein sequence |
| 72 | DNA | RS-WUS | Raphanus sativus WUS coding sequence |
| 73 | PRT | RS-WUS | Raphanus sativus WUS protein sequence |
| 74 | DNA | BN-WUS | Brassica napus WUS coding sequence |
| 75 | PRT | BN-WUS | Brassica napus WUS protein sequence |
| 76 | DNA | BO-WUS | Brassica oleracea var. oleracea WUS |
| | | | coding sequence |
| 77 | PRT | BO-WUS | Brassica oleracea var. oleracea WUS |
| | | | protein sequence |
| 78 | DNA | HA-WUS | Helianthus annuus WUS coding |
| | | | sequence |
| 79 | PRT | HA-WUS | Helianthus annuus WUS protein |
| | | | sequence |
| 80 | DNA | PT-WUS | Populus trichocarpa WUS coding |
| | | | sequence |
| 81 | PRT | PT-WUS | Populus trichocarpa WUS protein |
| | | | sequence |
| 82 | DNA | VV-WUS | Vitis vinifera WUS coding sequence |
| 83 | PRT | vv-WUS | Vitis vinifera WUS protein sequence |
| 84 | DNA | AT-WUS | Arabidopsis thaliana WUS coding |
| | | | sequence (soy optimized) |
| 85 | PRT | AT-WUS | Arabidopsis thaliana WUS protein |
| | | | sequence |
| 86 | DNA | LJ-WUS | Lotus japonicus WUS coding sequence |
| | | | (soy optimized) |
| 87 | PRT | LJ-WUS | Lotus japonicus WUS protein sequence |
| 88 | DNA | MT-WUS | Medicago trunculata WUS coding |
| | | | sequence (soy optimized) |
| 89 | PRT | MT-WUS | Medicago trunculata WUS protein |
| | | | sequence |
| 90 | DNA | PY-WUS | Petunia hybrida WUS coding sequence |
| | | | (soy optimized) |
| 91 | PRT | PY-WUS | Petunia hybrida WUS protein sequence |
| 92 | DNA | PV-WUS | Phaseolus vulgaris WUS coding |
| | | | sequence (soy optimized) |
| 93 | PRT | PV-WUS | Phaseolus vulgaris WUS protein |
| | | | sequence |
| 94 | DNA | ZM-WUS1 | Zea mays WUS1 coding sequence |
| 95 | PRT | ZM-WUS1 | Zea mays WUS1 protein sequence |
| 96 | DNA | ZM-WUS2 | Zea mays WUS2 coding sequence |
| 97 | PRT | ZM-WUS2 | Zea mays WUS2 protein sequence |
| 98 | DNA | ZM-WUS3 | Zea mays WUS3 coding sequence |
| 99 | PRT | ZM-WUS3 | Zea mays WUS3 protein sequence |
| 100 | DNA | ZM-WOX2A | Zea mays WOX2A coding sequence |
| 101 | PRT | ZM-WOX2A | Zea mays WOX2A protein sequence |
| 102 | DNA | ZM-WOX4 | Zea mays WOX4 coding sequence |
| 103 | PRT | ZM-WOX4 | Zea mays WOX4 protein sequence |
| 104 | DNA | ZM-WOX5A | Zea mays WOX5A coding sequence |
| 105 | PRT | ZM-WOX5A | Zea mays WOX5A protein sequence |
| 106 | DNA | ZM-WOX9 | Zea mays WOX9 coding sequence |
| 107 | PRT | ZM-WOX9 | Zea mays WOX9 protein sequence |
| 108 | DNA | GM-HBSTART2 | Glycine max HBSTART2 |
| | | | (Homeodomain StAR-related lipid |
| | | | transfer2) promoter sequence |
| 109 | DNA | GM-MATE1 | Glycine max MATE1 (Multi- |
| | | | antimicrobial extrusion protein1) |
| | | | promoter sequence |
| 110 | DNA | GM-NED1 | Glycine max NED1 (NAD dependent |
| | | | epimerase/dehydratase1) promoter |
| | | | sequence |
| 111 | DNA | PHP80728 | Synthetic construct comprising the T- |
| | | | DNA (RB to LB) (RB + GM-UBQ |
| | | | PRO::GM-UBQ INTRON1::TAG- |
| | | | RFP::UBQ3 TERM + GM-SAMS |
| | | | PRO::GM-SAMS INTRON1::GM- |
| | | | HRA::GM-ALS TERM + LB) |
| 112 | DNA | PHP80730 | Synthetic construct comprising the T- |
| | | | DNA (RB to LB) (RB + GM-LTP3 |
| | | | PRO::AT-WUS::UBQ14 TERM + GM- |
| | | | UBQ PRO::GM-UBQ INTRON1::TAG- |
| | | | RFP::UBQ3 TERM + GM-SAMS |
| | | | PRO::GM-SAMS INTRON1::GM- |
| | | | HRA::GM-ALS TERM + LB) |
| 113 | DNA | PHP80734 | Synthetic construct comprising the T- |
| | | | DNA (RB to LB) (RB + GM- |
| | | | HBSTART2 PRO::AT-WUS::UBQ14 |
| | | | TERM + GM-UBQ PRO::GM-UBQ |
| | | | INTRON1::TAG-RFP::UBQ3 TERM + |
| | | | GM-SAMS PRO::GM-SAMS |
| | | | INTRON1::GM-HRA::GM-ALS |
| | | | TERM + LB) |
| 114 | DNA | PHP80736 | Synthetic construct comprising the T- |
| | | | DNA (RB to LB) (RB + GM-MATE1 |
| | | | PRO::AT-WUS::UBQ14 TERM + GM- |
| | | | UBQ PRO::GM-UBQ INTRON1::TAG- |
| | | | RFP::UBQ3 TERM + GM-SAMS |
| | | | PRO::GM-SAMS INTRON1::GM- |
| | | | HRA::GM-ALS TERM + LB) |
| 115 | DNA | PHP81060 | Synthetic construct comprising the T- |
| | | | DNA (RB to LB) (RB + GM-NED1 |
| | | | PRO::AT-WUS::UBQ14 TERM + GM- |
| | | | UBQ PRO::GM-UBQ INTRON1::TAG- |
| | | | RFP::UBQ3 TERM + GM-SAMS |
| | | | PRO::GM-SAMS INTRON1::GM- |
| | | | HRA::GM-ALS TERM + LB) |
| 116 | DNA | PHP81343 | Synthetic construct comprising the T- |
| | | | DNA (RB to LB) (RB + GM- |
| | | | HBSTART3 PRO::AT-WUS::UBQ14 |
| | | | TERM + GM-UBQ PRO::GM-UBQ |
| | | | INTRON1::TAG-RFP::UBQ3 TERM + |
| | | | GM-SAMS PRO::GM-SAMS |
| | | | INTRON1::GM-HRA::GM-ALS |
| | | | TERM + LB) |
| 117 | DNA | QC318 | GM-EF1A PRO::GM-EF1A |
| | | | INTRON1::ZS-YELLOW::NOS TERM + |
| | | | GM-SAMS PRO::GM-SAMS |
| | | | INTRON1::GM-ALS::GM-ALS TERM |
| 118 | DNA | pVER9662 | AT-UBIQ10 PRO::AT-UBIQ10 |
| | | | INTRON1::AT-WUS::UBQ14 TERM |
| 119 | DNA | UBIGMWUS | AT-UBIQ10 PRO::AT-UBIQ10 |
| | | | INTRON1::GM-WUS:: UBQ3 TERM |
| 120 | DNA | UBIMTWUS | AT-UBIQ10 PRO::AT-UBIQ10 |
| | | | INTRON1::MT-WUS:: UBQ3 TERM |
| 121 | DNA | UBILJWUS | AT-UBIQ10 PRO::AT-UBIQ10 |
| | | | INTRON1::LJ-WUS:: UBQ3 TERM |
| 122 | DNA | UBIPVWUS | AT-UBIQ10 PRO::AT-UBIQ10 |
| | | | INTRON1::PV-WUS:: UBQ3 TERM |
| 123 | DNA | UBIPYWUS | AT-UBIQ10 PRO::AT-UBIQ10 |
| | | | INTRON1::PY-WUS:: UBQ3 TERM |
| 124 | DNA | GM-LTP3 | Glycine max LTP3 (Lipid Transfer |
| | | | Protein3) promoter sequence |
| 125 | DNA | AT-ML1 | Arabidopsis thaliana ML1 (MERISTEM |
| | | (TRUNCATED) | LAYER1) promoter sequence |
| | | | (TRUNCATED) |
| 126 | DNA | AT-CER6 | Arabidopsis thaliana CER6 |
| | | (TRUNCATED1) | (ECERIFERUM6) promoter sequence |
| | | | (TRUNCATED) |
| 127 | DNA | GG- WUS | Gnetum gnemon WUS coding sequence |
| 128 | PRT | GG- WUS | Gnetum gnemon WUS protein sequence |
| 129 | DNA | MD-WUS | Malus domestica WUS coding sequence |
| 130 | PRT | MD-WUS | Malus domestica WUS protein sequence |
| 131 | DNA | ME-WUS | Manihot esculenta WUS coding |
| | | | sequence |
| 132 | PRT | ME-WUS | Manihot esculenta WUS protein |
| | | | sequence |
| 133 | DNA | KF-WUS | Kalanchoe fedtschenkoi WUS coding |
| | | | sequence |
| 134 | PRT | KF-WUS | Kalanchoe fedtschenkoi WUS protein |
| | | | sequence |
| 135 | DNA | GH-WUS | Gossypium hirsutum WUS coding |
| | | | sequence |
| 136 | PRT | GH-WUS | Gossypium hirsutum WUS protein |
| | | | sequence |
| 137 | DNA | ZOSMA-WUS | Zostera marina WUS coding sequence |
| 138 | PRT | ZOSMA-WUS | Zostera marina WUS protein sequence |
| 139 | DNA | AMBTR-WUS | Amborella trichopoda WUS coding |
| | | | sequence |
| 140 | PRT | AMBTR-WUS | Amborella trichopoda WUS protein |
| | | | sequence |
| 141 | DNA | AC-WUS | Aquilegia coerulea WUS coding |
| | | | sequence |
| 142 | PRT | AC-WUS | Aquilegia coerulea WUS protein |
| | | | sequence |
| 143 | DNA | AH-WUS | Amaranthus hypochondriacus WUS |
| | | | coding sequence |
| 144 | PRT | AH-WUS | Amaranthus hypochondriacus WUS |
| | | | protein sequence |
| 145 | DNA | CUCSA-WUS | Cucumis sativus WUS coding sequence |
| 146 | PRT | CUCSA -WUS | Cucumis sativus WUS protein sequence |
| 147 | DNA | PINTA-WUS | Pinus taeda WUS coding sequence |
| 148 | PRT | PINTA-WUS | Pinus taeda WUS protein sequence |
| 149 | DNA | AT-PDF1 | Arabidopsis thaliana PDF1 |
| | | (TRUNCATED) | (PROTODERMAL FACTOR1) |
| | | | promoter sequence (TRUNCATED) |
| 150 | DNA | AT-PDF2 | Arabidopsis thaliana PDF1 |
| | | (TRUNCATED) | (PROTODERMAL FACTOR1) |
| | | | promoter sequence (TRUNCATED) |
| 151 | DNA | AT-HDG2 | Arabidopsis thaliana HDG2 |
| | | (TRUNCATED) | (HOMEODOMAIN GLABROUS2) |
| | | | promoter sequence (TRUNCATED) |
| 152 | DNA | AT-ANL2 | Arabidopsis thaliana Anthocyanless2 |
| | | | promoter |
| 153 | DNA | RV021090 | Synthetic construct comprising the T- |
| | | | DNA (RB to LB): RB + CAMV35S |
| | | | PRO::HA-WUS::OS-T28 TERM + GM- |
| | | | UBQ PRO::GM-UBQ 5′ UTR::GM- |
| | | | UBQ INTRON1::ZS-YELLOW1 |
| | | | N1::NOS TERM + AT-UBIQ10 |
| | | | PRO::AT-UBIQ10 5′ UTR::AT-UBIQ10 |
| | | | INTRON1::CTP::SPCN::UBQ14 |
| | | | TERM + LB |
| 154 | DNA | RV026522 | T-DNA with GNEGN-WUS (GG - |
| | | | Gnetum gnemon) |
| | | | Synthetic construct comprising the T- |
| | | | DNA (RB to LB): RB + CAMV35S |
| | | | PRO:: GG-WUS::OS-T28 TERM + GM- |
| | | | UBQ PRO::GM-UBQ 5UTR::GM-UBQ |
| | | | INTRON1::ZS-YELLOW1 N1::NOS |
| | | | TERM + AT-UBIQ10 PRO::AT- |
| | | | UBIQ10 5UTR::AT-UBIQ10 |
| | | | INTRON1::CTP::SPCN::UBQ14 |
| | | | TERM + LB |
| 155 | DNA | RV026526 | T-DNA with VITVI-WUS (VV - Vitis |
| | | | vinifera) |
| | | | Synthetic construct comprising the T- |
| | | | DNA (RB to LB): RB + CAMV35S |
| | | | PRO::VV-WUS::OS-T28 TERM + GM- |
| | | | UBQ PRO::GM-UBQ 5′ UTR::GM- |
| | | | UBQ INTRON1::ZS-YELLOW1 |
| | | | N1::NOS TERM + AT-UBIQ10 |
| | | | PRO::AT-UBIQ10 5′ UTR::AT-UBIQ10 |
| | | | INTRON1::CTP::SPCN::UBQ14 |
| | | | TERM + LB |
| 156 | DNA | RV026534 | T-DNA with PETHY-WUS (PH - |
| | | | Petunia hybrida) |
| | | | Synthetic construct comprising the T- |
| | | | DNA (RB to LB): RB + CAMV35S |
| | | | PRO::PH-WUS::OS-T28 TERM + GM- |
| | | | UBQ PRO::GM-UBQ 5′ UTR::GM- |
| | | | UBQ INTRON1::ZS-YELLOW1 |
| | | | N1::NOS TERM + AT-UBIQ10 |
| | | | PRO::AT-UBIQ10 5′ UTR::AT-UBIQ10 |
| | | | INTRON1::CTP::SPCN::UBQ14 |
| | | | TERM + LB |
| 157 | DNA | RV026531 | T-DNA with MALDO-WUS (MD - |
| | | | Malus domestica) |
| | | | Synthetic construct comprising the T- |
| | | | DNA (RB to LB): RB + CAMV35S |
| | | | PRO::MD-WUS::OS-T28 TERM + GM- |
| | | | UBQ PRO::GM-UBQ 5UTR::GM-UBQ |
| | | | INTRON1::ZS-YELLOW1 N1::NOS |
| | | | TERM + AT-UBIQ10 PRO::AT- |
| | | | UBIQ10 5UTR::AT-UBIQ10 |
| | | | INTRON1::CTP::SPCN::UBQ14 |
| | | | TERM + LB |
| 158 | DNA | RV026524 | T-DNA with MANES-WUS (ME - |
| | | | Manihot esculenta) |
| | | | Synthetic construct comprising the T- |
| | | | DNA (RB to LB): RB + CAMV35S |
| | | | PRO::ME-WUS::OS-T28 TERM + GM- |
| | | | UBQ PRO::GM-UBQ 5′ UTR::GM- |
| | | | UBQ INTRON1::ZS-YELLOW1 |
| | | | N1::NOS TERM + AT-UBIQ10 |
| | | | PRO::AT-UBIQ10 5′ UTR::AT-UBIQ10 |
| | | | INTRON1::CTP::SPCN::UBQ14 |
| | | | TERM + LB |
| 159 | DNA | RV026523 | T-DNA with KALFE-WUS (KF - |
| | | | Kalanchoe fedtschenkoi) |
| | | | Synthetic construct comprising the T- |
| | | | DNA (RB to LB): RB + CAMV35S |
| | | | PRO::KF-WUS::OS-T28 TERM + GM- |
| | | | UBQ PRO::GM-UBQ 5′ UTR::GM- |
| | | | UBQ INTRON1::ZS-YELLOW1 |
| | | | N1::NOS TERM + AT-UBIQ10 |
| | | | PRO::AT-UBIQ10 5′ UTR::AT-UBIQ10 |
| | | | INTRON1::CTP::SPCN::UBQ14 |
| | | | TERM + LB |
| 160 | DNA | RV026530 | T-DNA with GOSHI-WUS (GH - |
| | | | Gossypium hirsutum) |
| | | | Synthetic construct comprising the T- |
| | | | DNA (RB to LB): RB + CAMV35S |
| | | | PRO::GH-WUS::OS-T28 TERM + GM- |
| | | | UBQ PRO::GM-UBQ 5′ UTR::GM- |
| | | | UBQ INTRON1::ZS-YELLOW1 |
| | | | N1::NOS TERM + AT-UBIQ10 |
| | | | PRO::AT-UBIQ10 5′ UTR::AT- |
| | | | UBIQ10 |
| | | | INTRON1::CTP::SPCN::UBQ14 |
| | | | TERM + LB |
| 161 | DNA | RV026527 | T-DNA with ZOSMA-WUS (Zostera |
| | | | marina) |
| | | | Synthetic construct comprising the T- |
| | | | DNA (RB to LB): RB + CAMV35S |
| | | | PRO::ZOSMA-WUS::OS-T28 TERM + |
| | | | GM-UBQ PRO::GM-UBQ 5′ |
| | | | UTR::GM-UBQ INTRON1::ZS- |
| | | | YELLOW1 N1::NOS TERM + AT- |
| | | | UBIQ10 PRO::AT-UBIQ10 5′ |
| | | | UTR::AT-UBIQ10 |
| | | | INTRON1::CTP::SPCN::UBQ14 |
| | | | TERM + LB |
| 162 | DNA | RV026529 | T-DNA with AMBTR-WUS (Amborella |
| | | | trichopoda) |
| | | | Synthetic construct comprising the T- |
| | | | DNA (RB to LB): RB + CAMV35S |
| | | | PRO::AMBTR-WUS::OS-T28 TERM + |
| | | | GM-UBQ PRO::GM-UBQ 5′ |
| | | | UTR::GM-UBQ INTRON1::ZS- |
| | | | YELLOW1 N1::NOS TERM + AT- |
| | | | UBIQ10 PRO::AT-UBIQ10 5′ |
| | | | UTR::AT-UBIQ10 |
| | | | INTRON1::CTP::SPCN::UBQ14 |
| | | | TERM + LB |
| 163 | DNA | RV026528 | T-DNA with AQUCO-WUS (Aquilegia |
| | | | coerulea) |
| | | | Synthetic construct comprising the T- |
| | | | DNA (RB to LB): RB + CAMV35S |
| | | | PRO::AC-WUS::OS-T28 TERM + GM- |
| | | | UBQ PRO::GM-UBQ 5′ UTR::GM- |
| | | | UBQ INTRON1::ZS-YELLOW1 |
| | | | N1::NOS TERM + AT-UBIQ10 |
| | | | PRO::AT-UBIQ10 5′ UTR::AT-UBIQ10 |
| | | | INTRON1::CTP::SPCN::UBQ14 |
| | | | TERM + LB |
| 164 | DNA | RV026520 | T-DNA with POPTR-WUS (Populus |
| | | | trichocarpa) |
| | | | Synthetic construct comprising the T- |
| | | | DNA (RB to LB): RB + CAMV35S |
| | | | PRO::PT-WUS::OS-T28 TERM + GM- |
| | | | UBQ PRO::GM-UBQ 5′ UTR::GM- |
| | | | UBQ INTRON1::ZS-YELLOW1 |
| | | | N1::NOS TERM + AT-UBIQ10 |
| | | | PRO::AT-UBIQ10 5; UTR::AT-UBIQ10 |
| | | | INTRON1::CTP::SPCN::UBQ14 |
| | | | TERM + LB |
| 165 | DNA | RV026533 | T-DNA with AMAHY-WUS |
| | | | (Amaranthus hypochondriacus) |
| | | | Synthetic construct comprising the T- |
| | | | DNA (RB to LB): RB + CAMV35S |
| | | | PRO::AH-WUS::OS-T28 TERM + GM- |
| | | | UBQ PRO::GM-UBQ 5′ UTR::GM- |
| | | | UBQ INTRON1::ZS-YELLOW1 |
| | | | N1::NOS TERM + AT-UBIQ10 |
| | | | PRO::AT-UBIQ10 5′ UTR::AT-UBIQ10 |
| | | | INTRON1::CTP::SPCN::UBQ14 |
| | | | TERM + LB |
| 166 | DNA | RV026521 | T-DNA with CUCSA-WUS (Cucumis |
| | | | sativus) |
| | | | Synthetic construct comprising the T- |
| | | | DNA (RB to LB): RB + CAMV35S |
| | | | PRO::CS-WUS::OS-T28 TERM + GM- |
| | | | UBQ PRO::GM-UBQ 5′ UTR::GM- |
| | | | UBQ INTRON1::ZS-YELLOW1 |
| | | | N1::NOS TERM + AT-UBIQ10 |
| | | | PRO::AT-UBIQ10 5′ UTR::AT-UBIQ10 |
| | | | INTRON1::CTP::SPCN::UBQ14 |
| | | | TERM + LB |
| 167 | DNA | RV026525 | T-DNA with PINTA-WUS (Pinus taeda) |
| | | | Synthetic construct comprising the T- |
| | | | DNA (RB to LB): RB + CAMV35S |
| | | | PRO::PINTA-WUS::OS-T28 TERM + |
| | | | GM-UBQ PRO::GM-UBQ 5′ |
| | | | UTR::GM-UBQ INTRON1::ZS- |
| | | | YELLOW1 N1::NOS TERM + AT- |
| | | | UBIQ10 PRO::AT-UBIQ10 5′ |
| | | | UTR::AT-UBIQ10 |
| | | | INTRON1::CTP::SPCN::UBQ14 |
| | | | TERM + LB |
| 168 | DNA | RV022814 | T-DNA with NO WUS cassette |
| | | | Synthetic construct comprising the T- |
| | | | DNA (RB to LB): RB + CCDB + GM- |
| | | | UBQ PRO-V1::GM-UBQ 5′ UTR::GM- |
| | | | UBQ INTRON1::CTP::SPCN::UBQ14 |
| | | | TERM + GM-EF1A2 PRO:: GM-EF1A2 |
| | | | 5′ UTR:: GM-EF1A2 INTRON1:: GM- |
| | | | EF1A2 5′ UTR::DS-RED2::UBQ3 |
| | | | TERM + LB |
| 169 | DNA | RV027344 | T-DNA with AT-PDF2 PRO |
| | | | Synthetic construct comprising the T- |
| | | | DNA (RB to LB): RB + AT-PDF2 |
| | | | PRO::HA-WUS::OS-T28 TERM + GM- |
| | | | UBQ PRO::GM-UBQ 5′ UTR::GM- |
| | | | UBQ INTRON1::ZS-YELLOW1 |
| | | | N1::NOS TERM + AT-UBIQ10 |
| | | | PRO::AT-UBIQ10 5′ UTR::AT-UBIQ10 |
| | | | INTRON1::CTP::SPCN::UBQ14 |
| | | | TERM + LB |
| 170 | DNA | RV026532 | T-DNA for PRO TEST NEG-NO WUS |
| | | | Synthetic construct comprising the T- |
| | | | DNA (RB to LB): RB + GM-UBQ |
| | | | PR0-V1::GM-UBQ 5′ UTR::GM-UBQ |
| | | | INTRON1::ZS-YELLOW1 N1::NOS |
| | | | TERM + GM-UBQ PR0-V1::GM-UBQ |
| | | | 5′ UTR::GM-UBQ |
| | | | INTRON1::CTP::SPCN::UBQ14 TERM + |
| | | | GM-EF1A2 PRO:: GM-EF1A2 5′ |
| | | | UTR:: GM-EF1A2 INTR0N1:: GM- |
| | | | EF1A2 5′ UTR::DS-RED2::UBQ3 |
| | | | TERM + LB |
| 171 | DNA | RV027337 | T-DNA with AT-ANL2 PRO |
| | | | Synthetic construct comprising the T- |
| | | | DNA (RB to LB): RB + AT-ANL2 |
| | | | PRO::HA-WUS::OS-T28 TERM + GM- |
| | | | UBQ PRO::GM-UBQ 5′ UTR::GM- |
| | | | UBQ INTRON1::ZS-YELLOW1 |
| | | | N1::NOS TERM + AT-UBIQ10 |
| | | | PRO::AT-UBIQ10 5′ UTR::AT-UBIQ10 |
| | | | INTRON1::CTP::SPCN::UBQ14 |
| | | | TERM + LB |
| 172 | DNA | RV027338 | T-DNA with AT-CER6 PRO |
| | | | Synthetic construct comprising the T- |
| | | | DNA (RB to LB): RB + AT-CER6 |
| | | | PRO::HA-WUS::OS-T28 TERM + GM- |
| | | | UBQ PRO::GM-UBQ 5′ UTR::GM- |
| | | | UBQ INTRON1::ZS-YELLOW1 |
| | | | N1::NOS TERM + AT-UBIQ10 |
| | | | PRO::AT-UBIQ10 5′ UTR::AT-UBIQ10 |
| | | | INTRON1::CTP::SPCN::UBQ14 |
| | | | TERM + LB |
| 173 | DNA | RV027340 | T-DNA with AT-HDG2 PRO |
| | | | Synthetic construct comprising the T- |
| | | | DNA (RB to LB): RB + AT-HDG2 |
| | | | PRO::HA-WUS::OS-T28 TERM + GM- |
| | | | UBQ PRO::GM-UBQ 5′ UTR::GM- |
| | | | UBQ INTRON1::ZS-YELLOW1 |
| | | | N1::NOS TERM + AT-UBIQ10 |
| | | | PRO::AT-UBIQ10 5′ UTR::AT-UBIQ10 |
| | | | INTRON1::CTP::SPCN::UBQ14 |
| | | | TERM + LB |
| 174 | DNA | RV027342 | T-DNA with AT-ML1 PRO |
| | | | Synthetic construct comprising the T- |
| | | | DNA (RB to LB): RB + AT-ML1 |
| | | | PRO::HA-WUS::OS-T28 TERM + GM- |
| | | | UBQ PRO::GM-UBQ 5′ UTR::GM- |
| | | | UBQ INTRON1::ZS-YELLOW1 |
| | | | N1::NOS TERM + AT-UBIQ10 |
| | | | PRO::AT-UBIQ10 5′ UTR::AT-UBIQ10 |
| | | | INTRON1::CTP::SPCN::UBQ14 |
| | | | TERM + LB |
| 175 | DNA | RV027343 | T-DNA with AT-PDF1 PRO |
| | | | Synthetic construct comprising the T- |
| | | | DNA (RB to LB): RB + AT-PDF1 |
| | | | PRO::HA-WUS::OS-T28 TERM + GM- |
| | | | UBQ PRO::GM-UBQ 5′ UTR::GM- |
| | | | UBQ INTRON1::ZS-YELLOW1 |
| | | | N1::NOS TERM + AT-UBIQ10 |
| | | | PRO::AT-UBIQ10 5′ UTR::AT-UBIQ10 |
| | | | INTRON1::CTP::SPCN::UBQ14 |
| | | | TERM + LB |
| 176 | DNA | PCR Target1 | Synthetic sequence PCR Target1 |
| 177 | DNA | PCR Target2 | Synthetic sequence PCR Target2 |
| 178 | DNA | PCR Target3 | Synthetic sequence PCR Target3 |
| 179 | DNA | PCR Target4 | Synthetic sequence PCR Target4 |
| 180 | DNA | PCR Target5 | Synthetic sequence PCR Target5 |
| 181 | DNA | PCR Target6 | Synthetic sequence PCR Target6 |
| 182 | DNA | PCR Target7 | Synthetic sequence PCR Target7 |
| 183 | DNA | PCR Target8 | Synthetic sequence PCR Target8 |
| 184 | DNA | PCR Target9 | Synthetic sequence PCR Target9 |
| 185 | DNA | PCR Target10 | Synthetic sequence PCR Target10 |
| 186 | DNA | PCR Target11 | Synthetic sequence PCR Target11 |
| 187 | DNA | PCR Target12 | Synthetic sequence PCR Target12 |
| 188 | DNA | PCR Target13 | Synthetic sequence PCR Target13 |
| 189 | DNA | AT-CER6 | Arabidopsis thaliana CER6 |
| | | (TRUNCATED2) | (ECERIFERUM6) promoter sequence |
| | | | (TRUNCATED2) |

[0241] The following examples are offered by way of illustration and not by way of limitation.

### EXAMPLES

[0242] The aspects of the disclosure are further defined in the following Examples, in which parts and percentages are by weight and degrees are Celsius, unless otherwise stated. These Examples, while indicating aspects of the disclosure, are given by way of illustration only. From the above discussion and these Examples, one skilled in the art can ascertain the essential characteristics of the aspects of the disclosure, and without departing from the spirit and scope thereof, can make various changes and modifications of them to adapt to various usages and conditions. Thus, various modifications in addition to those shown and described herein will be apparent to those skilled in the art from the foregoing description. Such modifications are also intended to fall within the scope of the appended claims.

### Example 1. Plant Materials and Media Compositions

[0243] A wide range of tissue or explant types can be used in the current method, including suspension cultures, immature cotyledons, mature cotyledons, split seed, embryonic axes, hypocotyls, epicotyls and leaves. The compositions of various media used in soybean transformation, tissue culture and regeneration are outlined in Table 2. In this table, medium M1 is used for initiation of suspension cultures, if this is the starting material for transformation. Media M2 and M3 represent typical co-cultivation media useful for Agrobacterium transformation of the entire range of explants listed above. Medium M4 is useful for selection (with the appropriate selective agent), M5 is used for somatic embryo maturation, and medium M6 is used for germination to produce T0 plantlets.

TABLE 2
Composition of Cultivation Media M1-M5

| | M1 | | M2 | | M3 | | M4 | | M5 | M6 |
|---|---|---|---|---|---|---|---|---|---|---|
| MS salt with | 4.44 | g/L | | | | | 4.4 | g/L | 4.44 g/L | |
| B5 vitamins | | | | | | | | | | |
| (PhytoTech | | | | | | | | | | |
| M404) | | | | | | | | | | |
| Gamborg B-5 | | | | | | | | | | 3.21 g/L |
| basal medium | | | | | | | | | | |
| (PhytoTech | | | | | | | | | | |
| G398) | | | | | | | | | | |
| Modified MS | | | 2.68 | g/L | 2.68 | g/L | | | | |
| salt | | | | | | | | | | |
| (PhytoTech | | | | | | | | | | |
| M571) | | | | | | | | | | |
| B5 vitamins | | | 1 | ml | 1 | ml | 1 | ml | | |
| (1000X) | | | | | | | | | | |
| (PhytoTech | | | | | | | | | | |
| G249) | | | | | | | | | | |
| 2,4-D stock | 4 | ml | 1 | ml | 1 | ml | 4 | ml | | |
| 10 mg/ml | | | | | | | | | | |
| KNO₃ | | | 1.64 | g/L | 1.64 | g/L | | | | |
| (NH₄)₂SO₄ | | | 0.463 | g/L | 0.463 | g/L | | | | |
| Asparagine | | | 1 | g/L | 1 | g/L | | | | |
| Sucrose | | | 68.5 | g/L | 85.6 | g/L | | | | 20 g/L |
| Glucose | 31.5 | g/L | 36 | g/L | 49.6 | g/L | 31.5 | g/L | | |
| Maltose | | | | | | | | | 60 g/L | |
| MgCl₂•6H₂O | | | | | | | | | 0.75 g/L | |
| Activated | | | | | | | | | 5 g/L | |
| charcoal | | | | | | | | | | |
| (PhytoTech | | | | | | | | | | |
| C325) | | | | | | | | | | |
| Casein | | | 1 | g/L | 1 g/L | g/L | | | | |
| hydrolysate | | | | | | | | | | |
| (PhytoTech | | | | | | | | | | |
| C184) | | | | | | | | | | |
| pH | 7.0 | | 5.4 | | 5.4 | | 7.0 | | 5.7 | 5.7 |
| Acetosyringone | | | 300 | μM | 300 | μM | | | | |
| TC agar | 4 | g/L | | | | | | | | 5 g/L |
| Gelrite (Plant | | | | | | | 2 | g/L | 2 g/L | |
| Media Cat# | | | | | | | | | | |
| 714246) | | | | | | | | | | |

[0244] After 1-5 days of co-culture, the tissue is cultured on M3 medium with no selection for one week (recovery period), and then moved onto selection. For selection, an antibiotic or herbicide is added to M3 medium for the selection of stable transformants. To begin counter-selection against Agrobacterium, 300 mg/l Timentin® (sterile ticarcillin disodium mixed with clavulanate potassium, PlantMedia, Dublin, Ohio, USA) is also added, and both the selective agent and Timentin® are maintained in the medium throughout selection (up to total 8 weeks). The selective media is replaced weekly. After 6-8 weeks on selective medium, transformed tissue becomes visible as green tissue against a background of bleached (or necrotic), less healthy tissue. These pieces of tissue are cultured for an additional 4-8 weeks.

[0245] Green and healthy somatic embryos are then transferred to M5 media containing 100 mg/L Timentin®. After a total of 4 weeks of maturation on M5 media, mature somatic embryos are placed in a sterile, empty Petri dish, sealed with Micropore™ tape (3M Health Care, St. Paul, Minn., USA) or placed in a plastic box (with no fiber tape) for 4-7 days at room temperature.

[0246] Desiccated embryos are planted in M6 media where they are left to germinate at 26° C. with an 18-hour photoperiod at 60-100 μE/m²/s light intensity. After 4-6 weeks in germination media, the plantlets are transferred to moistened Jiffy-7 peat pellets (Jiffy Products Ltd, Shippagan, Canada), and kept enclosed in clear plastic tray boxes until acclimatized in a Percival incubator under the following conditions, a 16-hour photoperiod at 60-100 μE/m²/s, 26° C./24° C. day/night temperatures. Finally, hardened plantlets are potted in 2 gallon pots containing moistened SunGro 702 and grown to maturity, bearing seed, in a greenhouse.

### Example 2. Transformation of Soybean

[0247] Standard protocols for particle bombardment (Finer and McMullen, 1991, In Vitro Cell Dev. Biol.—Plant 27:175-182), Agrobacterium-mediated transformation (Jia et al., 2015, Int J. Mol. Sci. 16:18552-18543; US20170121722 incorporated herein by reference in its entirety), or Ochrobactrum-mediated transformation (US20180216123 incorporated herein by regerence in its entirety) for soybean can be used with the methods of the disclosure.

### Example 3. The GM-LTP3 Promoter Controlling WUS Expression Improves Soy Transformation

[0248] The Agrobacterium strain AGL1, containing a T-DNA with the expression cassette GM-LTP3 PRO::AT-WUS::UBQ14 TERM+GM-UBQ PRO::GM-UBQ INTRON1::TAG-RFP::UBQ3 TERM+GM-SAMS PRO::GM-SAMS INTRON1::GM-HRA::GM-ALS TERM (PHP80730; SEQ ID NO:112), was used to transform Pioneer soybean variety PHY21. Four days after the Agrobacterium infection was started, the tissue was washed with sterile culture medium to remove excess bacteria. Nine days later the tissue was moved to somatic embryo maturation medium, and twenty-two days after that the transgenic somatic embryos were ready for dry-down. At this point, well-formed, mature somatic embryos were fluorescing red under an epifluorescence stereo-microscope with an RFP filter set. The somatic embryos that developed were functional and germinated to produce healthy plants in the greenhouse. This rapid method of producing somatic embryos and germinating to form plants reduced the typical timeframe from Agrobacterium infection to moving transgenic T0 plants into the greenhouse from four months (for conventional soybean transformation) to two months.

### Example 4. The GM-HBSTART3 Promoter Controlling WUS Expression Improves Soy Transformation Maturation Efficiency

[0249] In soybean varieties that are difficult to transform, it is commonly observed that many of the transgenic somatic embryos that do form during the soybean transformation process fail to mature properly. Failure of the somatic embryos to mature ultimately results in greatly reduced frequencies of germination to form transgenic plantlets that will survive in the greenhouse. Promoters (GM-HBSTART3 (SEQ ID NO:1), GM-LTP3 (SEQ ID NO:124), GM-HBSTART2 (SEQ ID NO:108), GM-MATE1(SEQ ID NO:109), GM-NED1 (SEQ ID NO:110)) driving WUS expression were tested to determine their impact on soy transformation maturation efficiency. The GM-HBSTART3 promoter (SEQ ID NO:1) driving WUS expression (PHP81343; SEQ ID NO:116) greatly improved the efficiency of somatic embryo maturation, increasing maturation efficiency from a median value of less than 8% in the TAG-RFP control (PHP80728; SEQ ID NO:111) to over 50%. See FIG. 1. This directly translated into an increased frequency of transgenic mature somatic embryos that were capable of germinating to form transgenic T0 plants. See FIGS. 3A and 3B.

[0250] Using other promoters to drive expression of WUS resulted in intermediate maturation efficiencies, with median levels of 13%, 33%, 13% and 15% for the GM-HBSTART2 (PHP80734; SEQ ID NO:113), GM-LTP3 (PHP80730; SEQ ID NO:112), GM-MATE1 (PHP80736; SEQ ID NO:114) or the GM-NED1(PHP81060; SEQ ID NO:115) promoters, respectively. See FIG. 1. In the TAG-RFP control treatment (PHP80728; SEQ ID NO:111), somatic embryos were small and under-developed at 5-6 weeks after Agrobacterium-infection, while the somatic embryos in the GM-LTP3 PRO::WUS (PHP80730; SEQ ID NO:112) and GM-HBSTART3 PRO::WUS (PHP81343; SEQ ID NO:116) treatments were approximately 2 to 5-fold larger, respectively. See FIG. 2A-2F.

### Example 5. The GM-HBSTART3 or the GM-LTP3 Promoter Controlling Expression of Morphogenic Genes Improves Transformation

[0251] Using the GM-HBSTART3 promoter (SEQ ID NO: 1), the GM-LTP3 promoter (SEQ ID NO:124) or any of the other promoters disclosed herein to drive expression of an Arabidopsis LEC1, LEC2, KN1, STM or LEC1-like (Kwong et al., (2003) The Plant Cell, Vol. 15, 5-18) gene in expression cassettes comprising a fluorescent marker, is found to increase the frequency of somatic embryo formation and the recovery of transgenic T0 plants. Agrobacterium strain LBA4404 is used to transform various explant types, including immature cotyledons, split seeds, isolated embryonic axes, mature cotyledonary nodes, hypocotyl, epicotyl or leaf tissue of Pioneer soybean variety PHY21. Four days after the Agrobacterium infection is started, the tissue is washed with sterile culture medium to remove excess bacteria. It is expected that approximately nine days later the tissue is moved to somatic embryo maturation medium, and approximately twenty-two days after that the transgenic somatic embryos are ready for dry-down. At this point, well-formed, mature somatic embryos fluoresce under an epifluorescence stereo-microscope with an appropriate filter set. The somatic embryos that develop are functional and germinate to produce healthy plants in the greenhouse. It is expected that this rapid method of producing somatic embryos and germinating to form plants reduces the typical timeframe from Agrobacterium infection to moving transgenic T0 plants into the greenhouse from four months (for conventional soybean transformation) to approximately two to three months.

### Example 6. Use of the GM-HBSTART3 or the GM-LTP3 Promoter to Control Expression of the Agrobacterium IPT Gene Stimulates Direct Shoot Formation and Improves Transformation

[0252] Using the GM-HBSTART3 promoter (SEQ ID NO: 1), the GM-LTP3 promoter (SEQ ID NO:124) or any of the other promoters disclosed herein to drive expression of an Agrobacterium IPT gene in expression cassettes comprising a fluorescent marker, is found to increase the frequency of multiple shoot formation and the recovery of transgenic T0 plants. Agrobacterium strain LBA4404 is used to transform various explant types, including immature cotyledons, split seeds, isolated embryonic axes, mature cotyledonary nodes, hypocotyl, epicotyl or leaf tissue of Pioneer soybean variety PHY21. Four days after the Agrobacterium infection is started, the tissue is washed with sterile culture medium to remove excess bacteria and moved onto medium that promotes multiple shoot proliferation. It is expected that nine days later the tissue is moved to medium that favors shoot development, and twenty-two after that the transgenic shoots are moved onto medium that promotes rooting. At this point, incipient plantlets fluoresce under an epifluorescence stereo-microscope with an appropriate filter set. Functional plantlets develop rapidly and continue to grow and produce healthy plants in the greenhouse. It is expected that this rapid method of directly forming transgenic plants reduces the typical timeframe from Agrobacterium infection to moving transgenic T0 plants into the greenhouse from four months (for conventional soybean transformation) to approximately two to three months.

### Example 7. The GM-HBSTART3 or the GM-LTP3 Promoter Controlling Expression of the Arabidopsis Monopteros-Delta Gene Stimulates Direct Shoot Formation and Improves Transformation

[0253] Using the GM-HBSTART3 promoter (SEQ ID NO: 1), the GM-LTP3 promoter (SEQ ID NO:124) or any of the other promoters disclosed herein to drive expression of an Arabidopsis MONOPTEROS-DELTA gene in expression cassettes comprising a fluorescent marker, is found to increase the frequency of multiple shoot formation and the recovery of transgenic T0 plants. Agrobacterium strain LBA4404 is used to transform various explant types, including immature cotyledons, split seeds, isolated embryonic axes, mature cotyledonary nodes, hypocotyl, epicotyl or leaf tissue in the Pioneer soybean variety PHY21. Four days after the Agrobacterium infection is started, the tissue is washed with sterile culture medium to remove excess bacteria and moved onto medium that promotes multiple shoot proliferation. It is expected that nine days later the tissue is moved to medium that favors shoot development, and twenty-two days after that the transgenic shoots are moved onto medium that promotes rooting. At this point, incipient plantlets fluoresce under an epifluorescence stereo-microscope with an appropriate filter set. Functional plantlets develop rapidly and continue to grow and produce healthy plants in the greenhouse. It is expected that this rapid method of directly forming transgenic plants reduces the typical timeframe from Agrobacterium infection to moving transgenic T0 plants into the greenhouse from four months (for conventional soybean transformation) to approximately two to three months.

### Example 8. The GM-HBSTART3 or the GM-LTP3 Promoter Controlling Expression of Growth Enhancing Genes Improves Transformation

[0254] Using the GM-HBSTART3 promoter (SEQ ID NO: 1), the GM-LTP3 promoter (SEQ ID NO:124) or any of the other promoters disclosed herein to drive expression of an Agrobacterium AV-6B gene, an Agrobacterium IAA-h gene, an Agrobacterium IAA-m gene, an Arabidopsis SERK or an Arabidopsis AGL15 gene in expression cassettes comprising a fluorescent marker, is found to increase the frequency of somatic embryo formation and the recovery of transgenic T0 plants. Agrobacterium strain LBA4404 is used to transform various explant types, including immature cotyledons, split seeds, isolated embryonic axes, mature cotyledonary nodes, hypocotyl, epicotyl or leaf tissue of Pioneer soybean variety PHY21. Four days after the Agrobacterium infection is started, the tissue is washed with sterile culture medium to remove excess bacteria. It is expected that nine days later the tissue is moved to somatic embryo maturation medium, and twenty-two days after that the transgenic somatic embryos are ready for dry-down. At this point, well-formed, mature somatic embryos fluoresce under an epifluorescence stereo-microscope with an appropriate filter set. The somatic embryos that develop are functional and germinate to produce healthy plants in the greenhouse. It is expected that this rapid method of producing somatic embryos and germinating to form plants reduces the typical timeframe from Agrobacterium infection to moving transgenic T0 plants into the greenhouse from four months (for conventional soybean transformation) to approximately two to three months.

### Example 9. Use of Viral Enhancer Elements in Conjunction with the GM-HBSTART3 Promoter T0 Drive Expression of WUS Results in Further Improvement of Soy Transformation

[0255] Relative to using the GM-HBSTART3 promoter (SEQ ID NO: 1), the GM-LTP3 promoter (SEQ ID NO:124) or any of the other promoters disclosed herein alone, use of a viral enhancer element such as the 35S enhancer adjacent to the GM-HBSTART3 promoter (SEQ ID NO: 1), the GM-LTP3 promoter (SEQ ID NO:124) or any of the other promoters disclosed herein to drive expression of WUS in expression cassettes comprising a fluorescent marker, results in a further increase in the frequency of somatic embryo formation and the frequency of somatic embryo maturation, resulting in an overall increase in the recovery of transgenic T0 plants. Agrobacterium strain LBA4404 is used to transform various explant types, including immature cotyledons, split seeds, isolated embryonic axes, mature cotyledonary nodes, hypocotyl, epicotyl or leaf tissue of Pioneer soybean variety PHY21. Four days after the Agrobacterium infection is started, the tissue is washed with sterile culture medium to remove excess bacteria. Nine days later the tissue is moved to somatic embryo maturation medium, and twenty-two days after that transgenic somatic embryos are ready for dry-down. At this point, well-formed, mature somatic embryos fluoresce under an epifluorescence stereo-microscope with an appropriate filter set. The somatic embryos that develop are functional and germinate to produce healthy plants in the greenhouse. This rapid method of producing somatic embryos and germinating to form plants reduces the typical timeframe from Agrobacterium infection to moving transgenic T0 plants into the greenhouse from four months (for conventional soybean transformation) to approximately two to three months.

[0256] Other enhancer elements are tested in a similar fashion, and are shown to also result in increased transformation relative to using the GM-HBSTART3 promoter (SEQ ID NO: 1) alone. These enhancers include the viral enhancers such as the Cauliflower Mosaic Virus 35S and the Mirabilis Mosaic Virus 2×MMV as well as the endogenous plant enhancer elements.

### Example 10. Orthologs of the Arabidopsis WUS Gene Function in Soybean T0 Stimulate Somatic Embryo Formation

[0257] The following treatments were compared. For the particle gun transformation treatments, all contained plasmid QC318 (SEQ ID NO: 117) with GM-EF1A PRO::GM-EF1A INTRON1::ZS-YELLOW::NOS TERM+GM-SAMS PRO::GM-SAMS INTRON1::GM-ALS::GM-ALS TERM. The treatments included 1) a control with no addition genes, 2) pVER9662 (SEQ ID NO: 118) with the AT-UBI PRO driving expression of the Arabidopsis WUS gene, 3) UBIGMWUS (SEQ ID NO: 119) with the AT-UBI PRO driving expression of the Glycine max WUS gene, 4) UBIMTWUS (SEQ ID NO: 120) with the AT-UBI PRO driving expression of the Medicago truncatula WUS gene, 5) UBILJWUS (SEQ ID NO: 121) with the AT-UBI PRO driving expression of the Lotus japonica WUS gene, 6) UBIPVWUS (SEQ ID NO: 122) with the AT-UBI PRO driving expression of the Phaseolus vulgaris WUS gene, and 7) UBIPYWUS (SEQ ID NO: 123) with the AT-UBI PRO driving expression of the petunia WUS gene.

[0258] Immature cotyledons were isolated from the seed, pre-cultured for two weeks, and then transformed with the particle gun, co-introducing a mixture of two plasmids, the first containing an expression cassette consisting of the AT-UBI PRO driving expression of the cDNA sequence for each of the WUS orthologs (pVER9662 (SEQ ID NO: 118), UBIGMWUS (SEQ ID NO: 119), UBIMTWUS (SEQ ID NO: 120), UBILJWUS (SEQ ID NO: 121), UBIPVWUS (SEQ ID NO: 122), and UBIPYWUS (SEQ ID NO: 123)) plus an expression cassette for ZS-YELLOW (QC318 (SEQ ID NO: 117)). The explants were cultured for two weeks. At two weeks, the number of fluorescing globular somatic embryos were counted and tabulated for each treatment.

[0259] Two weeks after particle gun transformation, fluorescent globular somatic embryos were rarely observed on the bombarded control cotyledons, while for all the other treatments (containing WUS genes from different dicot species driven by the AT-UBI promoter), numerous fluorescent somatic embryos were observed on bombarded cotyledons.

### Example 11. Orthologs of the Arabidopsis WUS Gene Function in Brassica T0 Stimulate Somatic Embryo Formation

[0260] Various explant types, including immature cotyledons, split seeds, isolated embryonic axes, mature cotyledonary nodes, hypocotyl, epicotyl or leaf tissue of Brassica are isolated for transformation with orthologs of the Arabidopsis WUS gene. The following treatments are compared. For the particle gun transformation treatments, all contain plasmid QC318 (SEQ ID NO: 117) with GM-EF1A PRO::GM-EF1A INTRON1::ZS-YELLOW::NOS TERM+GM-SAMS PRO::GM-SAMS INTRON1::GM-ALS::GM-ALS TERM. The treatments include 1) a control with no addition genes, 2) pVER9662 (SEQ ID NO: 118) with the AT-UBI PRO driving expression of the Arabidopsis WUS gene, 3) UBIGMWUS (SEQ ID NO: 119) with the AT-UBI PRO driving expression of the Glycine max WUS gene, 4) UBIMTWUS (SEQ ID NO: 120) with the AT-UBI PRO driving expression of the Medicago truncatula WUS gene, 5) UBILJWUS (SEQ ID NO: 121) with the AT-UBI PRO driving expression of the Lotus japonica WUS gene, 6) UBIPVWUS (SEQ ID NO: 122) with the AT-UBI PRO driving expression of the Phaseolus vulgaris WUS gene, and 7) UBIPYWUS (SEQ ID NO: 123) with the AT-UBI PRO driving expression of the petunia WUS gene.

[0261] Various explant types, including immature cotyledons, split seeds, isolated embryonic axes, mature cotyledonary nodes, hypocotyl, epicotyl or leaf tissue of Brassica are isolated for transformation with the particle gun, co-introducing a mixture of two plasmids, the first containing an expression cassette consisting of the AT-UBI PRO driving expression of the cDNA sequence for each of the WUS orthologs (pVER9662 (SEQ ID NO: 118), UBIGMWUS (SEQ ID NO: 119), UBIMTWUS (SEQ ID NO: 120), UBILJWUS (SEQ ID NO: 121), UBIPVWUS (SEQ ID NO: 122), and UBIPYWUS (SEQ ID NO: 123)) plus an expression cassette for ZS-YELLOW (QC318 (SEQ ID NO: 117)). The explants are cultured for two weeks. At two weeks, the number of fluorescing globular somatic embryos are counted and tabulated for each treatment.

[0262] Two weeks after particle gun transformation, fluorescent globular somatic embryos are rarely observed on the bombarded control explant types, including immature cotyledons, split seeds, isolated embryonic axes, mature cotyledonary nodes, hypocotyl, epicotyl or leaf tissue of Brassica, while for all the other treatments (containing WUS genes from different dicot species driven by the AT-UBI promoter), numerous fluorescent somatic embryos are observed on bombarded explant types, including immature cotyledons, split seeds, isolated embryonic axes, mature cotyledonary nodes, hypocotyl, epicotyl or leaf tissue of Brassica.

### Example 12. Orthologs of the Arabidopsis WUS Gene Function in Sunflower T0 Stimulate Somatic Embryo Formation

[0263] Various explant types, including immature cotyledons, split seeds, isolated embryonic axes, mature cotyledonary nodes, hypocotyl, epicotyl or leaf tissue of sunflower are isolated for transformation with orthologs of the Arabidopsis WUS gene. The following treatments are compared. For the particle gun transformation treatments, all contain plasmid QC318 (SEQ ID NO: 117) with GM-EF1A PRO::GM-EF1A INTRON1::ZS-YELLOW::NOS TERM+GM-SAMS PRO::GM-SAMS INTRON1::GM-ALS::GM-ALS TERM. The treatments include 1) a control with no addition genes, 2) pVER9662 (SEQ ID NO: 118) with the AT-UBI PRO driving expression of the Arabidopsis WUS gene, 3) UBIGMWUS (SEQ ID NO: 119) with the AT-UBI PRO driving expression of the Glycine max WUS gene, 4) UBIMTWUS (SEQ ID NO: 120) with the AT-UBI PRO driving expression of the Medicago truncatula WUS gene, 5) UBILJWUS (SEQ ID NO: 121) with the AT-UBI PRO driving expression of the Lotus japonica WUS gene, 6) UBIPVWUS (SEQ ID NO: 122) with the AT-UBI PRO driving expression of the Phaseolus vulgaris WUS gene, and 7) UBIPYWUS (SEQ ID NO: 123) with the AT-UBI PRO driving expression of the petunia WUS gene.

[0264] Various explant types, including immature cotyledons, split seeds, isolated embryonic axes, mature cotyledonary nodes, hypocotyl, epicotyl or leaf tissue of sunflower are isolated for transformation with the particle gun, co-introducing a mixture of two plasmids, the first containing an expression cassette consisting of the AT-UBI PRO driving expression of the cDNA sequence for each of the WUS orthologs (pVER9662 (SEQ ID NO: 118), UBIGMWUS (SEQ ID NO: 119), UBIMTWUS (SEQ ID NO: 120), UBILJWUS (SEQ ID NO: 121), UBIPVWUS (SEQ ID NO: 122), and UBIPYWUS (SEQ ID NO: 123)) plus an expression cassette for ZS-YELLOW (QC318 (SEQ ID NO: 117)). The explants are cultured for two weeks. At two weeks, the number of fluorescing globular somatic embryos are counted and tabulated for each treatment.

[0265] Two weeks after particle gun transformation, fluorescent globular somatic embryos are rarely observed on the bombarded control explant types, including immature cotyledons, split seeds, isolated embryonic axes, mature cotyledonary nodes, hypocotyl, epicotyl or leaf tissue of sunflower, while for all the other treatments (containing WUS genes from different dicot species driven by the AT-UBI promoter), numerous fluorescent somatic embryos are observed on bombarded explant types, including immature cotyledons, split seeds, isolated embryonic axes, mature cotyledonary nodes, hypocotyl, epicotyl or leaf tissue of sunflower.

### Example 13. Orthologs of the Arabidopsis WUS Gene Stimulate Morphogenic Growth in Brassica

[0266] WUS genes from 12 different dicotyledonous species, 2 gymnosperms, and one monocot species were tested for efficacy by assessing their ability to stimulate growth of transgenic green shoot responses in Brassica while undergoing selection on spectinomycin-containing medium. For all treatments containing a WUS expression cassette, the configuration of the T-DNA was identical with the exception of the WUS gene used in the construct. This T-DNA configuration was RB+CAMV35S PRO::WUS::OS-T28 TERM+GM-UBQ PRO::GM-UBQ 5UTR::GM-UBQ INTRON1::ZS-YELLOW1 N1::NOS TERM+AT-UBIQ10 PRO::AT-UBIQ10 5UTR::AT-UBIQ10 INTRON1::CTP::SPCN::UBQ14 TERM+LB with the variable WUS gene in bold and italics.

[0267] Seeds of Brassica napus were surface sterilized in a 50% Clorox solution and germinated on solid medium containing MS basal salts and vitamins. The seedlings were grown at 28° C. in the light for 10 to 14 days, and the hypocotyls were dissected away from the cotyledons. The hypocotyl explants were transferred into 100×25 mm petri plates containing 10 mls of 20A medium (Table 3) with 200 mM acetosyringone and then sliced into sections 3-5 mm long. After slicing, 40 μl of Agrobacterium solution (Agrobacterium strain LBA4404 THY—at an Optical Density of 0.50 at 550 nM) containing the expression cassettes described above were added to the plates, and the petri plates containing the hypocotyl/Agrobacterium mixture were placed on a shaker platform and lightly agitated for 10 minutes. After 10 minutes of gentle agitation, the plates were moved into dim light and 21° C. for 3 days of co-cultivation.

[0268] After co-cultivation, the hypocotyl explants were removed from the Agrobacterium solution, and lightly blotted onto sterile filter paper before placing onto 70A selection media (Table 3) (containing 10 mg/l spectinomycin) and moved to the light room (26° C. and bright light). Explants remained on 70A selection media for two weeks prior to transfer to a second round of 70A selection (alternatively, explants were moved to 70B medium (Table 3) with 20 mg/l spectinomycin for the second round of selection). After two rounds of selection the explants were transferred to 70C shoot elongation media (Table 3) for 2-3 weeks and placed back into the light room. Shoots were then transferred onto 90A rooting media (Table 3) before being transferred to soil in the greenhouse.

TABLE 3
Media For Canola Transformation

Infection and co-cultivation medium (20A); MS salts and vitamins, 0.1 g/l myo-inositol,
0.5 g/l MES buffer, 0.1 mg/l a-NAA, 1 mg/l BAP, 10 ug/l gibberelic acid, 50 mg/l
thymidine, pH 5.5.
First Selection medium (70A); MS salts and vitamins, 0.1 g/l myo-inositol, 0.5 g/l
MES buffer, 0.1 mg/l a-NAA, 1 mg/l BAP, 10 ug/l gibberelic acid, 40 mg/l adenine
hemisulfate, 20 g/l sucrose, 0.5 g/l PVP40, 2 mg/l silver nitrate, 0.5 g/l carbenicillin,
5 mg/l spectinomycin, 5 g/l TC agar, pH 5.7.
Second Selection medium (70B); MS salts and vitamins, 0.1 g/l myo-inositol, 0.5 g/l
MES buffer, 0.1 mg/l a-NAA, 1 mg/l BAP, 10 ug/l gibberelic acid, 40 mg/l adenine
hemisulfate, 20 g/l sucrose, 0.5 g/l PVP40, 2 mg/l silver nitrate, 0.5 g/l carbenicillin,
10 mg/l spectinomycin, 5 g/l TC agar, pH 5.7.
Regeneration Medium (70C); MS salts and vitamins, 0.1 g/l myo-inositol, 0.5 g/l
MES buffer, 2.5 ug/l BAP, 40 mg/l adenine hemisulfate, 20 g/l sucrose, 0.5 g/l
PVP40, 0.5 g/l carbenicillin, 10 mg/l spectinomycin, 5 g/l TC agar, pH 5.7.
Rooting Medium (90A); MS salts and vitamins, 0.5 mg/l IBA, pH 5.7.

[0269] As shown in Table 4 WUS genes from different species stimulated growth responses of transgenic green shoots in canola. This stimulation of shoot development and the ability to recover spectinomycin-resistant shoots was variable, depending on the source of the WUS gene. For cucumber, this stimulation of transgenic shoots was marginally above the levels seen in the negative control treatments, but ranged for WUS genes from other species up to 95% for Gnetum gnemon (a gymnosperm), with a response above 70% being observed for WUS genes from grape, eelgrass (a monocot), Kalanchoe, petunia, apple, sunflower, cassava and Gnetum.

TABLE 4
Efficacy* of WUS genes from various species

| | | WUS | | | | | |
|---|---|---|---|---|---|---|---|
| | Plasmid | Gene | | | | # | |
| Plasmid | SEQ ID | SEQ ID | | | Total | green | % WUS |
| Number | NO: | NO: | Genus species | Common name | Explants | shoots | response |
| RV021090 | 153 | 78 | Helianthus annuus | Sunflower | 128 | 110 | 86% |
| RV026522 | 154 | 127 | Gnetum gnemon | Gnetum | 41 | 39 | 95% |
| RV026526 | 155 | 82 | Vitis vinifera | Grape | 81 | 58 | 72% |
| RV026534 | 156 | 90 | Petunia hybrida | Petunia | 121 | 97 | 80% |
| RV026531 | 157 | 129 | Malus domestica | Apple | 43 | 35 | 81% |
| RV026524 | 158 | 131 | Manihot esculenta | Cassava | 38 | 34 | 89% |
| RV026523 | 159 | 133 | Kalanchoe fedtschenkoi | Lavander scallops | 40 | 31 | 78% |
| RV026530 | 160 | 135 | Gossypium hirsutum | Cotton | 41 | 22 | 54% |
| RV026527 | 161 | 137 | Zostera marina | Eelgrass | 40 | 30 | 75% |
| RV026529 | 162 | 139 | Amborella trichopoda | Amborella | 44 | 20 | 45% |
| RV026528 | 163 | 141 | Aquilegia coerulea | Columbine | 40 | 21 | 53% |
| RV026520 | 164 | 80 | Populus trichocarpa | Poplar | 49 | 7 | 14% |
| RV026533 | 165 | 143 | Amaranthus hypochondriacus | Amaranth | 41 | 6 | 15% |
| RV026521 | 166 | 145 | Cucumis sativus | Cucumber | 69 | 4 | 6% |
| RV026525 | 167 | 147 | Pinus taeda | Pine | 43 | 5 | 12% |
| RV022814 | 168 | NA | None | No Wus | 38 | 2 | 5% |
| no agro | NA | NA | None | no agro | 124 | 2 | 2% |

*Efficacy of WUS genes from various species, as measured by the percentage of starting hypocotyl explants that produced green, fluorescent shoots from the explants (on spectinomycin selection) at 28 days after Agrobacterium infection, wherein the starting hypocotyl explants were transformed by an Agrobacterium with a T-DNA containing a WUS gene as described above.

### Example 14. Use of Promoters from the Hd-Zip IV Transcription Factor Family Controlling Expression of a Sunflower WUS Ortholog Stimulate Morphogenic Growth in Brassica

[0270] Arabidopsis promoters driving expression of an ortholog of the Arabidopsis WUS gene from sunflower (Helianthus annuus) were tested for efficacy by assessing their ability to stimulate growth of transgenic green shoot responses in Brassica while undergoing selection on spectinomycin-containing medium. For all treatments a T-DNA was used containing three expression cassettes RB+HD-ZIP IV PRO::HA-WUS::OS-T28 TERM+GM-UBQ PRO::GM-UBQ 5UTR::GM-UBQ INTRON1::ZS-YELLOW1 N1::NOS TERM+AT-UBIQ10 PRO::AT-UBIQ10 5UTR::AT-UBIQ10 INTRON1::CTP::SPCN::UBQ14 TERM+LB, with the variable promoter HD-ZIP IV PRO in bold and italics.

[0271] The promoters tested were from Arabidopsis, and included Protodermal Factor 1 (PDF1, SEQ ID NO: 149), Protodermal Factor2 (PDF2, SEQ ID NO: 150), Glabrous2 (HDG2, SEQ ID NO: 151), Meristem Layer1 (ML1, SEQ ID NO: 125), Eceriferum6 (CER6, SEQ ID NO: 126), and Anthocyanless (ANL1, SEQ ID NO: 152). The T-DNA configuration for the plasmids containing these promoters is shown in Table 1 in RV027343, RV027344, RV027340, RV027342, RV027338, and RV027337, respectively, which correspond to SEQ ID NOS. 175, 169, 173, 174, 172, and 171, respectively. These promoters were compared to the CaMV35S PRO (for T-DNA information, see RV021090, SEQ ID NO: 153) as a positive control, and a T-DNA with no WUS expression cassette as a negative control (for T-DNA information, see RV026532, SEQ ID NO: 170).

[0272] Surface sterilization of Brassica seed, germination to produce seedlings, preparation of the hypocotyl explants, transformation with Agrobacterium strain LBA4404 THY-, tissue culture and selection using spectinomycin were all performed as described in Example 13.

[0273] Results are presented on a scale of 0 to 10, with zero (0) being no response beyond that of the negative control and ten (10) matching the strong morphogenic response stimulation observed with the CaMV35S PRO. For the various promoters tested, the response observed with the PDF1 PRO was 5, for the PDF2 PRO the response was 2.3, for the HDG2 PRO the response was 2.2, for the ML1 the response was 2, for the CER6 PRO the response was 2, and for the ANL1 PRO the response was 2. The CaMV35S promoter is a strong constitutive promoter which can be undesirable when driving expression of WUS; while strong initial expression is beneficial immediately after integration of the T-DNA (to rapidly stimulate shoot formation), strong expression in the whole plant results in morphological abnormalities and sterility. The HD-ZIP IV promoters tested were expressed in the L1 (epidermal) layer of developing embryos and meristems, and are otherwise not expressed in the whole plant. Thus, a positive growth stimulation of shoot formation after T-DNA delivery with down-regulation of the WUS expression as the vegetative and reproductive portions of the plant develop was the desired result and was achieved. This rapid growth stimulation of shoot formation was demonstrated for all the HD-ZIP IV promoters tested.

1. A nucleic acid molecule comprising a morphogenic gene cassette comprising a tissue-preferred promoter having a nucleotide sequence selected from the group consisting of:
(a) at least one of SEQ ID NOS: 1-59, 108-110, 124-126, 149-152, and 189, wherein the nucleotide sequence initiates transcription in a plant cell;
(b) a nucleotide sequence that is at least 95% identical to at least one of SEQ ID NOS: 1-59, 108-110, 124-126, 149-152, and 189, wherein the nucleotide sequence initiates transcription in a plant cell;
(c) a nucleotide sequence that is at least 70% identity to at least one of SEQ ID NOS: 1-59, 108-110, 124-126, 149-152, and 189, wherein the nucleotide sequence initiates transcription in a plant cell;
(d) a fragment or variant of the nucleotide sequence of at least one of SEQ ID NOS: 1-59, 108-110, 124-126, 149-152, and 189, wherein the fragment or variant of the nucleotide sequence initiates transcription in a plant cell; or
(e) at least 100 contiguous nucleotides of a nucleotide sequence of at least one of SEQ ID NOS: 1-59, 108-110, 124-126, 149-152, and 189, wherein the at least 100 contiguous nucleotides of the nucleotide sequence initiates transcription in a plant cell;
wherein the tissue-preferred promoter of (a)-(e) is operably linked to a morphogenic gene, wherein the morphogenic gene encodes a WUS/WOX homeobox polypeptide,
wherein the WUS/WOX homeobox polypeptide comprises an amino acid sequence of any of SEQ ID NOS: 61, 63, 65, 67, 69, 71, 73, 75, 77, 79, 81, 83, 85, 87, 89, 91, 93, 128, 130, 132, 134, 136, 138, 140, 142, 144, 146, or 148; or wherein the WUS/WOX homeobox polypeptide is encoded by a nucleotide sequence of any of SEQ ID NOS: 60, 62, 64, 66, 68, 70, 72, 74, 76, 78, 80, 82, 84, 86, 88, 90, 92, 127, 129, 131, 133, 135, 137, 139, 141, 143, 145, or 147.

2. An expression cassette comprising the morphogenic gene cassette of claim 1.

3. A vector comprising the expression cassette of claim 2.

4. A plant cell comprising the expression cassette of claim 2.

5. The plant cell of claim 4, wherein the plant cell is from a monocot, a dicot, or a gymnosperm.

6. The plant cell of claim 5, wherein the monocot, the dicot, or the gymnosperm is selected from the group consisting of maize, alfalfa, sorghum, rice, millet, soybean, wheat, cotton, sunflower, barley, oats, rye, flax, sugarcane, banana, cassava, common bean, cowpea, tomato, potato, beet, grape, Eucalyptus, poplar, pine, douglas fir, citrus, papaya, cacao, cucumber, apple, Capsicum, bamboo, Triticale, melon, or Brassica.

7-8. (canceled)

9. The plant cell of claim 4, wherein the expression cassette further comprises a trait gene cassette comprising a heterologous polynucleotide encoding a gene product conferring nutritional enhancement, increased yield, abiotic stress tolerance, drought tolerance, cold tolerance, herbicide tolerance, pest resistance, pathogen resistance, insect resistance, nitrogen use efficiency (NUE), disease resistance, or an ability to alter a metabolic pathway.

10. The plant cell of claim 9, wherein the expression cassette further comprises a site-specific recombinase cassette comprising a nucleotide sequence encoding a site-specific recombinase selected from the group consisting of FLP, FLPe, KD, Cre, SSV1, lambda Int, phi C31 Int, HK022, R, B2, B3, Gin, Tn1721, CinH, ParA, Tn5053, Bxb1, TP907-1, or U153, wherein the site-specific recombinase is operably linked to a constitutive promoter, an inducible promoter, a tissue-specific promoter, or a developmentally regulated promoter.

11. The plant cell of claim 10, wherein the constitutive promoter, the inducible promoter, the tissue-specific promoter, or the developmentally regulated promoter is selected from the group consisting of UBI, LLDAV, EVCV, DMMV, BSV(AY) PRO, CYMV PRO FL, UBIZM PRO, SI-UB3 PRO, SB-UBI PRO (ALT1), USB1ZM PRO, ZM-GOS2 PRO, ZM-H1B PRO (1.2 KB), IN2-2, NOS, the −135 version of 35S, ZM-ADF PRO (ALT2), AXIG1, DR5, XVE, GLB1, OLE, LTP2, HSP17.7, HSP26, HSP18A, AT-HSP811, AT-HSP811L, GM-HSP173B, promoters activated by tetracycline, ethamethsulfuron or chlorsulfuron, PLTP, PLTP1, PLTP2, PLTP3, SDR, LGL, LEA-14A, or LEA-D34.

12. The plant cell of claim 11, wherein the morphogenic gene cassette and the site-specific recombinase cassette of the expression cassette are transiently expressed in the plant cell and the trait gene cassette of the expression cassette is stably incorporated into the genome of the plant cell.

13. The plant cell of claim 11, wherein the morphogenic gene cassette and the site-specific recombinase cassette of the expression cassette are excised from the plant cell and the trait gene cassette of the expression cassette is stably incorporated into the genome of the plant cell.

14. A plant comprising the expression cassette of claim 2.

15. The plant of claim 14, wherein the plant is a monocot, a dicot, or a gymnosperm.

16. The plant of claim 15, wherein the monocot, the dicot, or the gymnosperm is selected from the group consisting of maize, alfalfa, sorghum, rice, millet, soybean, wheat, cotton, sunflower, barley, oats, rye, flax, sugarcane, banana, cassava, common bean, cowpea, tomato, potato, beet, grape, Eucalyptus, poplar, pine, douglas fir, citrus, papaya, cacao, cucumber, apple, Capsicum, bamboo, Triticale, melon, or Brassica.

17-18. (canceled)

19. The plant of claim 14, wherein the expression cassette further comprises a trait gene cassette comprising a heterologous polynucleotide encoding a gene product conferring nutritional enhancement, increased yield, abiotic stress tolerance, drought tolerance, cold tolerance, herbicide tolerance, pest resistance, pathogen resistance, insect resistance, nitrogen use efficiency (NUE), disease resistance, or an ability to alter a metabolic pathway.

20. The plant of claim 19, wherein the expression cassette further comprises a site-specific recombinase cassette comprising a nucleotide sequence encoding a site-specific recombinase selected from the group consisting of FLP, FLPe, KD, Cre, SSV1, lambda Int, phi C31 Int, HK022, R, B2, B3, Gin, Tn1721, CinH, ParA, Tn5053, Bxb1, TP907-1, or U153, wherein the site-specific recombinase is operably linked to a constitutive promoter, an inducible promoter, a tissue-specific promoter, or a developmentally regulated promoter.

21. The plant of claim 20, wherein, wherein the constitutive promoter, the inducible promoter, the tissue-specific promoter, or the developmentally regulated promoter is selected from the group consisting of UBI, LLDAV, EVCV, DMMV, BSV(AY) PRO, CYMV PRO FL, UBIZM PRO, SI-UB3 PRO, SB-UBI PRO (ALT1), USB1ZM PRO, ZM-GOS2 PRO, ZM-H1B PRO (1.2 KB), IN2-2, NOS, the −135 version of 35S, ZM-ADF PRO (ALT2), AXIG1, DR5, XVE, GLB1, OLE, LTP2, HSP17.7, HSP26, HSP18A, AT-HSP811, AT-HSP811L, GM-HSP173B, promoters activated by tetracycline, ethamethsulfuron or chlorsulfuron, PLTP, PLTP1, PLTP2, PLTP3, SDR, LGL, LEA-14A, or LEA-D34.

22. The plant of claim 21, wherein the morphogenic gene cassette and the site-specific recombinase cassette of the expression cassette are transiently expressed in the plant and the trait gene cassette of the expression cassette is stably incorporated into the genome of the plant.

23. A seed of the plant of claim 22, wherein the seed comprises the trait gene cassette of the expression cassette.

24. The plant of claim 21, wherein the morphogenic gene cassette and the site-specific recombinase cassette of the expression cassette are excised from the plant and the trait gene cassette of the expression cassette is stably incorporated into the genome of the plant.

25. A seed of the plant of claim 24, wherein the seed comprises the trait gene cassette of the expression cassette.

26-30. (canceled)

31. A method of producing a transgenic plant comprising:
transforming a plant cell with a recombinant expression cassette comprising (a) a tissue-preferred promoter cassette, wherein the tissue-preferred promoter cassette comprises a nucleotide sequence selected from the group consisting of:
(i) at least one of SEQ ID NOS: 1-59, 108-110, 124-126, 149-152, and 189, wherein the nucleotide sequence initiates transcription in the plant cell;
(ii) a nucleotide sequence that is at least 95% identical to at least one of SEQ ID NOS: 1-59, 108-110, 124-126, 149-152, and 189, wherein the nucleotide sequence initiates transcription in the plant cell;
(iii) a nucleotide sequence that is at least 70% identical to at least one of SEQ ID NOS: 1-59, 108-110, 124-126, 149-152, and 189, wherein the nucleotide sequence initiates transcription in the plant cell;
(iv) a nucleotide sequence that is a fragment or variant of at least one of SEQ ID NOS: 1-59, 108-110, 124-126, 149-152, and 189, wherein the nucleotide sequence initiates transcription in the plant cell; or
(v) a nucleotide sequence that is at least a 100-bp fragment of at least one of SEQ ID NOS: 1-59, 108-110, 124-126, 149-152, and 189, wherein the nucleotide sequence initiates transcription in the plant cell, wherein the nucleotide sequence of (i)-(v) is operably linked to a morphogenic gene, wherein the morphogenic gene encodes a WUS/WOX homeobox polypeptide,
wherein the WUS/WOX homeobox polypeptide comprises an amino acid sequence of any of SEQ ID NOS: 61, 63, 65, 67, 69, 71, 73, 75, 77, 79, 81, 83, 85, 87, 89, 91, 93, 128, 130, 132, 134, 136, 138, 140, 142, 144, 146, or 148; or wherein the WUS/WOX homeobox polypeptide is encoded by a nucleotide sequence of any of SEQ ID NOS: 60, 62, 64, 66, 68, 70, 72, 74, 76, 78, 80, 82, 84, 86, 88, 90, 92, 127, 129, 131, 133, 135, 137, 139, 141, 143, 145, or 147, and (b) a trait gene cassette comprising a heterologous polynucleotide of interest encoding a gene product conferring nutritional enhancement, increased yield, abiotic stress tolerance, drought tolerance, cold tolerance, herbicide tolerance, pest resistance, pathogen resistance, insect resistance, nitrogen use efficiency (NUE), disease resistance, or an ability to alter a metabolic pathway;
selecting a transgenic plant cell having the recombinant expression cassette; and
regenerating the transgenic plant from the transgenic plant cell.

32. The method of claim 31, wherein the plant cell is a monocot, a dicot, or gymnosperm.

33. The method of claim 32, wherein the monocot, the dicot, or the gymnosperm is selected from the group consisting of maize, alfalfa, sorghum, rice, millet, soybean, wheat, cotton, sunflower, barley, oats, rye, flax, sugarcane, banana, cassava, common bean, cowpea, tomato, potato, beet, grape, Eucalyptus, poplar, pine, douglas fir, citrus, papaya, cacao, cucumber, apple, Capsicum, bamboo, Triticale, melon, or Brassica.

34-35. (canceled)

36. The method of claim 31, wherein the expression cassette further comprises a site-specific recombinase cassette comprising a nucleotide sequence encoding a site-specific recombinase selected from the group consisting of FLP, FLPe, KD, Cre, SSV1, lambda Int, phi C31 Int, HK022, R, B2, B3, Gin, Tn1721, CinH, ParA, Tn5053, Bxb1, TP907-1, or U153, wherein the site-specific recombinase is operably linked to a constitutive promoter, an inducible promoter, a tissue-specific promoter, or a developmentally regulated promoter.

37. The method of claim 36, wherein, wherein the constitutive promoter, the inducible promoter, the tissue-specific promoter, or the developmentally regulated promoter is selected from the group consisting of UBI, LLDAV, EVCV, DMMV, BSV(AY) PRO, CYMV PRO FL, UBIZM PRO, SI-UB3 PRO, SB-UBI PRO (ALT1), USB1ZM PRO, ZM-GOS2 PRO, ZM-H1B PRO (1.2 KB), IN2-2, NOS, the −135 version of 35S, ZM-ADF PRO (ALT2), AXIG1, DR5, XVE, GLB1, OLE, LTP2, HSP17.7, HSP26, HSP18A, AT-HSP811, AT-HSP811L, GM-HSP173B, promoters activated by tetracycline, ethamethsulfuron or chlorsulfuron, PLTP, PLTP1, PLTP2, PLTP3, SDR, LGL, LEA-14A, or LEA-D34.

38. The method of claim 37, further comprising excising the tissue-preferred promoter cassette and the site-specific recombinase cassette from the recombinant expression cassette.

39. The transgenic plant produced by the method of claim 38.

40. A seed of the transgenic plant of claim 39, wherein the seed comprises the trait gene cassette of the recombinant expression cassette.

41. The method of claim 31, wherein the tissue-preferred promoter cassette comprises a first T-DNA and the trait gene cassette comprises a second T-DNA.

42. The method of claim 41, wherein the first T-DNA and the second T-DNA reside in the same bacterial strain for transforming the plant cell.

43. The method of claim 42, further comprising segregating the first T-DNA away from the second T-DNA.

44. The transgenic plant produced by the method of claim 43.

45. A seed of the transgenic plant of claim 44, wherein the seed comprises the trait gene cassette of the recombinant expression cassette.

46. The method of claim 41, wherein the first T-DNA resides in a first bacterial strain and the second T-DNA resides in a second bacterial strain and the first bacterial strain and the second bacterial strain are mixed in a ratio for transforming the plant cell.

47. The method of claim 46, further comprising segregating the first T-DNA away from the second T-DNA.

48. The transgenic plant produced by the method of claim 47.

49. A seed of the transgenic plant of claim 48, wherein the seed comprises the trait gene cassette of the recombinant expression cassette.

50. A method of improving somatic embryo maturation efficiency or regeneration efficiency comprising:
transforming a plant cell with a recombinant expression cassette comprising (a) a tissue-preferred promoter cassette, wherein the tissue-preferred promoter cassette comprises a nucleotide sequence selected from the group consisting of:
(i) at least one of SEQ ID NOS: 1-59, 108-110, 124-126, 149-152, and 189, wherein the nucleotide sequence initiates transcription in the plant cell;
(ii) a nucleotide sequence that is at least 95% identical to at least one of SEQ ID NOS: 1-59, 108-110, 124-126, 149-152, and 189, wherein the nucleotide sequence initiates transcription in the plant cell;
(iii) a nucleotide sequence that is at least 70% identical to at least one of SEQ ID NOS: 1-59, 108-110, 124-126, 149-152, and 189, wherein the nucleotide sequence initiates transcription in the plant cell;
(iv) a nucleotide sequence that is a fragment or variant of at least one of SEQ ID NOS: 1-59, 108-110, 124-126, 149-152, and 189, wherein the nucleotide sequence initiates transcription in the plant cell;
(v) a nucleotide sequence that is at least a 100-bp fragment of at least one of SEQ ID NOS: 1-59, 108-110, 124-126, 149-152, and 189, wherein the nucleotide sequence initiates transcription in the plant cell, wherein the nucleotide sequence of (a)-(e) is operably linked to a morphogenic gene, wherein the morphogenic gene encodes a WUS/WOX homeobox polypeptide,
wherein the WUS/WOX homeobox polypeptide comprises an amino acid sequence of any of SEQ ID NOS: 61, 63, 65, 67, 69, 71, 73, 75, 77, 79, 81, 83, 85, 87, 89, 91, 93, 128, 130, 132, 134, 136, 138, 140, 142, 144, 146, or 148; or wherein the WUS/WOX homeobox polypeptide is encoded by a nucleotide sequence of any of SEQ ID NOS: 60, 62, 64, 66, 68, 70, 72, 74, 76, 78, 80, 82, 84, 86, 88, 90, 92, 127, 129, 131, 133, 135, 137, 139, 141, 143, 145, or 147, and (b) a trait gene cassette comprising a heterologous polynucleotide of interest encoding a gene product conferring nutritional enhancement, increased yield, abiotic stress tolerance, drought tolerance, cold tolerance, herbicide tolerance, pest resistance, pathogen resistance, insect resistance, nitrogen use efficiency (NUE), disease resistance, or an ability to alter a metabolic pathway;
selecting a transgenic plant cell having the recombinant expression cassette; and
regenerating the transgenic plant from the transgenic plant cell, wherein the recombinant expression cassette results in improved somatic embryo maturation efficiency or regeneration efficiency when compared to a transgenic plant cell not comprising the recombinant expression cassette.

51. The method of claim 50, wherein the plant cell is a monocot, a dicot, or a gymnosperm.

52. The method of claim 51, wherein the monocot, the dicot, or the gymnosperm is selected from the group consisting of maize, alfalfa, sorghum, rice, millet, soybean, wheat, cotton, sunflower, barley, oats, rye, flax, sugarcane, banana, cassava, common bean, cowpea, tomato, potato, beet, grape, Eucalyptus, poplar, pine, douglas fir, citrus, papaya, cacao, cucumber, apple, Capsicum, bamboo, Triticale, melon, or Brassica.

53-54. (canceled)

55. The method of claim 50, wherein the expression cassette further comprises a site-specific recombinase cassette comprising a nucleotide sequence encoding a site-specific recombinase selected from the group consisting of FLP, FLPe, KD, Cre, SSV1, lambda Int, phi C31 Int, HK022, R, B2, B3, Gin, Tn1721, CinH, ParA, Tn5053, Bxb1, TP907-1, or U153, wherein the site-specific recombinase is operably linked to a constitutive promoter, an inducible promoter, a tissue-specific promoter, or a developmentally regulated promoter.

56. The method of claim 55, wherein, wherein the constitutive promoter, the inducible promoter, the tissue-specific promoter, or the developmentally regulated promoter is selected from the group consisting of UBI, LLDAV, EVCV, DMMV, BSV(AY) PRO, CYMV PRO FL, UBIZM PRO, SI-UB3 PRO, SB-UBI PRO (ALT1), USB1ZM PRO, ZM-GOS2 PRO, ZM-H1B PRO (1.2 KB), IN2-2, NOS, the −135 version of 35S, ZM-ADF PRO (ALT2), AXIG1, DR5, XVE, GLB1, OLE, LTP2, HSP17.7, HSP26, HSP18A, AT-HSP811, AT-HSP811L, GM-HSP173B, promoters activated by tetracycline, ethamethsulfuron or chlorsulfuron, PLTP, PLTP1, PLTP2, PLTP3, SDR, LGL, LEA-14A, or LEA-D34.

57. The method of claim 56, further comprising excising the tissue-preferred promoter cassette and the site-specific recombinase cassette from the recombinant expression cassette.

58. The transgenic plant produced by the method of claim 57.

59. A seed of the transgenic plant of claim 58, wherein the seed comprises the trait gene cassette of the recombinant expression cassette.

60. The method of claim 50, wherein the tissue-preferred promoter cassette comprises a first T-DNA and the trait gene cassette comprises a second T-DNA.

61. The method of claim 60, wherein the first T-DNA and the second T-DNA reside in the same bacterial strain for transforming the plant cell.

62. The method of claim 61, further comprising segregating the first T-DNA away from the second T-DNA.

63. The transgenic plant produced by the method of claim 62.

64. A seed of the transgenic plant of claim 63, wherein the seed comprises the trait gene cassette of the recombinant expression cassette.

65. The method of claim 60, wherein the first T-DNA resides in a first bacterial strain and the second T-DNA resides in a second bacterial strain and the first bacterial strain and the second bacterial strain are mixed in a ratio for transforming the plant cell.

66. The method of claim 65, further comprising segregating the first T-DNA away from the second T-DNA.

67. The transgenic plant produced by the method of claim 66.

68. A seed of the transgenic plant of claim 67, wherein the seed comprises the trait gene cassette of the recombinant expression cassette.

69-111. (canceled)

The application's sequence listing, which the Patent Office published only in electronic form, follows.

SEQUENCE LISTING (189 sequences)

SEQ ID NO: 1 - DNA, 3200 bp, Glycine max
agttttttagtagtattttaacgttttttgaaacacctaacattcttttaagatattaccttctgaattctaattttttatattttctttcaattttattattaatatatttatttattttctttgttatcttttcttaaaataaattatgattttattattttttttatcattttatatttttcacctacttcaacaaactaattttttagtttccggtttaccaactagcttgcctacttctagctagtttttttactagttttgacaaaactaactaaagtcaaaaagttaattagtagttgaatgttgaaaatatatcttattaaatcataaaatggttgataaaattatttattaaagtaactgaacaatataaaattacatggacatatttttatacaacttttaatttgacttttttctataaaaagaactataatatttataatgttagtattaaattaattttaaacatttgtagctttttatttatgaaatataaaaaaatctacataaacttattatatatcaccatcaatatcatatataataaaatggtaaaaatgagaaaattctatcatatgtaaaaaagttaatttttttttcttaaataaaaaagattaaaaaggaaaacttataaatgttaaagaacaaaaaagaataaatacaaaaagttataaaaactagtgttttaaaaaatataacttaaaatttttaataacttctaacattttttaaaacgttacttaaggtaacactttttaatatatcaacttctattttattatatatcactatcaatatcatatataataaaatggtaaaaatgagaaaactctattatatataaaaagttaaaaataatgaattttttccttatataaaatagattaaaaaaaattctaataaatattcaacaacaataacataataaatataaaaagttacaaaaaaaaactaacatttttaaaaatataactttagtgtttcaaaaatccttagagttgttaaataaaaacttatttaccaaatttttaaactagtaaaaaaattaaaaactaattaaaatatcttgttaaatatattttaaatagtgtataatttatcatgtaagataatattcttatttttataataattactttaaaaatcatatctaaaagatttttaatatgtaatattatatatatatatatatatatatatatatatatatatatattcataaaacatcattaaaagtgacattaaaaacatattaaaaatcacattaaagcacattaataacatttaatttcaatactaagaactctttcaattcttgaaccaattacacttgtcttaatgggggaaaaaaaaacaaactctatacttatccgatcggaaaaactgcaaaagagaagaagaaatgaatgggagtgacacgcacaaattaatttcaagataccagcacttagtagcaatttagtagcatttgtttggtagccgtcattcgttgcattgcaccgtcaactcgcaaaaaatttattagtagttttatacaccaaaaatatgctgcgtctctttctctctcccctctctatcaattacacctcttttgccctccattaaatgcaattgcaccctctcaatacgctctgcaattactcttcgctgccacattttcctccatttgttccccacttccctctcctccttcaatgcccttgtccctatctcttcttcttctcctcactttctctctgtaacacctcttcatgccatagcttctttttcttttcttttttaccatataagtaaacattttttttttcaaaactgtcccaaacccttccttcaaaacggtcatctcttttcaacccaaaacagatctacaccttcatcttctactcccactctcactggtaagttaaaaaaaatcttgtttgtaaaacttctgtcgcaaccagggtcactgcgtgaatctctgtaacattcatgttttttttgttaaggttgtctaaggtcattgtttttttttaaagaaaaaaaaaagaaactaactaatgaaactgtttggtacaatttttttttttttttttgtgagttctaacatttttcaggtgagtcacttgtagctagggctgtgagaaaaggaacgttattaggtctgcaagaaaaaaaaagaaaaatatcctgatatataggatatgcgttgtaggattttctccgagatcttcgtgggtgttatattttctttaaaaaagttttgattttgttttgcgaaaagacaagatcagataagggttacaatatttctttgctttttaattcatatattttgatatgatatatgcatagcgtatatttgtttcgaaattttgattaagtttttttctctttaatcttttttttctcttggaggtcacgtttgtatcactgagtttttttgtagtaacacacacacttactcgctttgacattgctatctgacagaaaatccaagggctcaacttcttaagctttttctctatccaagaacctcttaggagagagaaagtgatatatatagagagagaaagagtcaattctacatatacttgttggtggtggtttttgaggcatgtgaagtatgcaagccgttattatgatgattccggcgagaaacatgccttcgatgatagcaaggaacaacaacaacgttggagggttttttggatcatcttcatcacctttcactcttgcccaggtcggtgcttttaacttttcaccttctctttcaactcttttgactctcttaccttctcttttttttttttttcacaattgtccacctctttaatttttcacccttttttcattaaaatttttgaaacaaaattgacccatctcaaaattttcacttttttaacgatcagtcgatcacatttgcatcacaaattaaaccaaccagaccaaatatccttctcgatattacaaatccgcgtttccccaaaactgcgttatttttctccataaaaaagtcaaaagaaaaaaaaaattaaactttctttaaaaaaaacaagaaagaaagaaaagaaaatgttgatatgtttgttgtgtctttttctctgagagagaaccgtactatactacatgtgtttgaattgtgtttttgttagattgagaaactataatcctctctccggaaccttaaaagatccgtagcaataatcata

SEQ ID NO: 2 - DNA, 1547 bp, Glycine max
agttttttagtagtattttaacgttttttgaaacacctaacattcttttaagatattaccttctgaattctaattttttatattttctttcaattttattattaatatatttatttattttctttgttatcttttcttaaaataaattatgattttattattttttttatcattttatatttttcacctacttcaacaaactaattttttagtttccggtttaccaactagcttgcctacttctagctagtttttttactagttttgacaaaactaactaaagtcaaaaagttaattagtagttgaatgttgaaaatatatcttattaaatcataaaatggttgataaaattatttattaaagtaactgaacaatataaaattacatggacatatttttatacaacttttaatttgacttttttctataaaaagaactataatatttataatgttagtattaaattaattttaaacatttgtagctttttatttatgaaatataaaaaaatctacataaacttattatatatcaccatcaatatcatatataataaaatggtaaaaatgagaaaattctatcatatgtaaaaaagttaatttttttttcttaaataaaaaagattaaaaaggaaaacttataaatgttaaagaacaaaaaagaataaatacaaaaagttataaaaactagtgttttaaaaaatataacttaaaatttttaataacttctaacattttttaaaacgttacttaaggtaacactttttaatatatcaacttctattttattatatatcactatcaatatcatatataataaaatggtaaaaatgagaaaactctattatatataaaaagttaaaaataatgaattttttccttatataaaatagattaaaaaaaattctaataaatattcaacaacaataacataataaatataaaaagttacaaaaaaaaactaacatttttaaaaatataactttagtgtttcaaaaatccttagagttgttaaataaaaacttatttaccaaatttttaaactagtaaaaaaattaaaaactaattaaaatatcttgttaaatatattttaaatagtgtataatttatcatgtaagataatattcttatttttataataattactttaaaaatcatatctaaaagatttttaatatgtaatattatatatatatatatatatatatatatatatatatatatattcataaaacatcattaaaagtgacattaaaaacatattaaaaatcacattaaagcacattaataacatttaatttcaatactaagaactctttcaattcttgaaccaattacacttgtcttaatgggggaaaaaaaaacaaactctatacttatccgatcggaaaaactgcaaaagagaagaagaaatgaatgggagtgacacgcacaaattaatttcaagataccagcacttagtagcaatttagtagcatttgtttggtagccattgagaaactataatcctctctccggaaccttaaaagatccgtagcaataatcata

SEQ ID NO: 3 - DNA, 3300 bp, Arabidopsis thaliana
taacaatgataagctacattgagtgtatcagttctaaaactttatagtatgctacaatcaatttttctaagtaacaacttcaagcaaggaatcacacacacacagtggtacataataaacttgattttaatatcatatgatcagcatcattaacggaataagttaagtaattcgtcatccatactactaagtcatattaaaatcataatcaaacttaaaagccgattagaaagagagcaaatatatctaaaaattcacgaggaagacgacaaatgcaaggaaacacagctagtattattaaacttaatagatattggatgaatgactgcataatatatatcacattaaaagtggacataaatttgcatatgtgtaatgtacctctccacaattaatcgcggaccatttattttactattacaagtcaagtaactttatattgttgatccataattcttttcgaacataaaatcatatacttaggccattttcaactgtcaaaactcgaatccgagaaccaaatttcaccattttccaaaaatgatgagtgtcgaccaaatggggtactactgtctaatcaggaacttgtgaacaaattttcaaccttttccaaataagacgagtgtcaaccaactttttccaaccaagagatattgggttgctacacaaatacttaatagccattgcatatttatgcatatgcaaatgcagggtcgtggcgtcagaaagaaacataggaccctcaacatatttaatattttgggagctatatttgactatttcatattagaaaataataataaaaaagtgttggttttatatcaaattgtaatttacgaaaaacttatgcttttgcgcaatgatttttgtaaagtatctactatgtttagtgtttacattgattagtaggctgccgttttttttcttgtgtattatgtactatatatgaatatgaacatttgtaaaagtgaatcttgtcattttcttgttgaaaacatatatagtatgtgcaaacaaagcataggttaatccaataccacacaaataacacgtcaggtaaatccaataataaatcgtatgtgcatgtatgtgtattcatgtatgttacatgaatgtctgaatcagtcagtgtacgtatatgatgtaggtgatgtaaatcttaatgtatgagctgtttcttggaccatggtccacaatggatattgctccccaactacattagtcaatcgactggccaatttttaattaagataattaatccaaactaccattaaatataactttgaccttttttctattcatttttagatattattggaacttacgtagtttacatgcatctcatccctttcttttgctccttgaaagtgggtccaatcacaaaaaatgatcttatattttgtattttgtattttaaaaactcataattatataggttcaaaaatttaattaacatcagtgtatactataattactactctagccaacaagataaattcattttgacatcagccaaaagataaaaatttggttaaaaactattggattagcttttagtatttaatattttatgtactgattaaatacgaatttagaaatctaggatataagtgagggtgtataataagggaggggtggaccattaatagcgatgtgcaattaaaaattatgattaagaatctaggaaatttgtagattgcttagttatttttatggcgatcgtcgtgtcaatgtcatggattttgaaactttaaattaatctcttaaattagcacctacctttgaattttatagaatctttttattttatatgtttaattttatagaatctaactagcttattttgagattaaattgtttagttacttttataacagtataaatgtataatgaggacctaagaatgtagtcctgtaatgttcttgctattctacttaatctcatcaccaatcaaccatcaaaagaagctagtactaataaaacctgcaggtattcgaataataattaagctcaaacactatactaatttatggaggattatatattcaatgaattaggaacctcatgatggacattattgactgatataatgtgtatactaattgtgagtatttaaaaaccatacaaagcatttatatgtccacatatattggacacacatgcaatcaatgttcaatatgctccacacacagaaataaaaatactctttctgatcatatgatacatcatacatatactaaaaaaatctaaaatgaactataaccacaagcatatataataacaatgaaatggtaatgtttcttcatttttatttgttcaaattcttattcggttgttttttcttaccctacgagaatccgtgaggtcaaagggaaacagtgattttttttttgtattttgttttttaaattgatgaactgtaaaactctctctctagaaaaatatataagtagtagtatgaattttctctcactaaaagcattaatggacctttcgataatcataaatgcaatgcaccctctctatgcatttcgcaataactccttttccttctgccacatcctcttcctcacctctttctcttcttccctttctcctaagttcctcctccaccaaattctccatttatttcgttaactatcctccatttgttttcttctgaagagtgatatattctacctttctctggttaaagaaactccctgaatccaccggttatgtcttgaccggctataagcctataaactgatgccctaagacacctttttaggtttctcaataattctccgcatctatcttttcttctccacaagtaagagaaccagaaaaccagagaagaagccgagctagctagggtttcattgtgtgcacaaaagtaagatctctctctctaaccaatacttgtgtaatttgtctttgtttctttgagcaaatattgcatgtttgttcatattagccggatccgttttatattttttcatgatctacattttatctttattttgtttgtaaattaatgagttttttttttttttttctgtttttgtcacgatctaaaaaacaagcgttacaaagaagaagaaaaacctttttggagttagaagtgtaaaaggggtttcagtttgacgaattttccttagtagttgtgtaaaaaaaggccattgacttaatgtcaactctatatatctacacatttttttattaattagtttttgtttttttcccacttcatttacctttagtcaatgaatttttactgaaaacgttttttcaaggtcaatttcactgagttaaaaaaaa

SEQ ID NO: 4 - DNA, 6022 bp, Glycine max
tcgttgaaaacagaaaatggtgatgagaatgtatttggttggatttttgaaaacattttcagtgaaaatgaaaacagaaaataaccagaaaatgaaaataataaaatttcgttttcagcgttttcaattgaaaacaagaacctcattttggataaaatgaaaatgagatgaaaataaatgtaattttaagcaaatttaaaaatacaaaaaaagtcaatatatcataaattttcaatatttttatttcctaaaaacagaaagcaaaaagttaaaccaaacatatttttagaattctaatctttagaaaataaaaacaattttcaaaaaatgaaaataaaaaataaaaatataaaccaaacacacaatatttcagcttgtgagtgcaaaacatatgcacgtttttcatttaagtatttctacagataactagacgaattgaaagttgttataaattttacttcaacaaccaccttaaaagggacctccgcatgatgatgaacgccactagttagaccatctctaatctctctgcattcttgcatgataagagaataatgaataattctaacataaaattagcttacgacattttcgcctctattactaatttgctagtattttatctttatctacctagcttgcattctgcatatgaaatttgtggcatgtaattttattaatgctatttaaaccaatgaatatattgaagctgcttctatgaattttactttttaacctaacatcaaattaatgacaaagaaaaggttcaaaaaattattttgaagcactactcgatcagaaaatggttcaatgaaatataaatgcatagctacagtggtgaactaagatctataatctctatatatccttatatattctttcattgatattcctcttaaaagtacatccaattgattgaagccttatctttacatgtataataaataataaaaaattagagcaataaacatatttacagattaactgacttaattaaagacaataaatatactaaacaaaaagaataagactataagagcatgtctcattattattaaaggtaattttgaaaataatatataaatttaggataaattatatatataaaaaggaacaaaaggcagcggttgattattaaattagttaatttgttgatgacttgtaaatcatgagaaactaaagaaaaataaaaaaacacctcaaacttccaccaaatcaccatatccaccgacagccaaatcaagtcataaaatgtcgatgaacctccccatctaccttgatcatgagtttgggattcaattgtagtgcattgacacctcgctttcaaagcaccctccagcctaatttgtagagccagtcaaacttgattctctacttttacctttatttaaaaaatcgtgcttaatatataatgcaagtttatagtatacccattccctttcttcacaaaaaaaaaaaatgaggaaatagaacattaagtactaggaatagacagagaagtctttcttaagttgggactgggatctcccgatctggtgggcggtactgtagcttaataaatctgactggggctattaggtggtgttttgtttgggagtttatttttttattttttatttttaaatttttaagatttataagatatgtatcaataataaattactttaagtttaagatatcatgatattttttgtttttcagaaaaggctaaaaatattgattttttgttttcagttttggatctatttttaaaagaaaatatttttaaaattttaaaaaaatacatttttattcttattttttttatttgaaaataaaaacaaaaaaacactcaaatcacgcatcattctagattttgagtgtctttttttctcaatgacaagagactattaatattttttagttcacttggtcataaactaattccactattagattttgagtgtgtgttaataaaaaatatttattaatcaacaatttttttatcaacaaatattaattttattaatagagagaatcaaattcacaattttttttaatcattcaacccacctcatatctcccaaatctatcaccagattaaatctttctaccatataagaatcaaatttaaataaacacaattattatttagtgactaattttgtcttctaaaattagtatataagaaaatttcatatttaacagctccaataagtctcactatgattatataccaaaattaaactcttagaagaattgttactgaaatcattaatatatatttttatggagaaaccattaaatttcaaaagagtctttctattataaattataatttataaatatgcttaatcaatatttcgcactaataaataatagaatgtttgcttataattaatttaatttgcgacgctagggttgagaaatacaggagttaaaagaagttgttgagttcagtggacctaggtcacaaaataaaagttaaattaagcatgaatgatatcgcgctctaactctcttctgttcacgtatatccatttacaccagtcgtccctccataaatgcttctacaccctctgcaataactccatgctgccaaaccttctctcacttgttctatttatctcctcctgcgttgtttcgttctgtctctattttgctttggcccaaactaaaactccatcaactactccttcacttccctaattccccccacacccattcttgtttctaccgttccagtcatcatcaacataactaattaaggtttacaccactatcaaacgcttaaggtcccctctcgcatatacgcgtgtttaattttagctttgacttgctttgctttgcttagcttagttaatttctgagtgagagaaaggggtaacggctacgtcccccgcattgaaattggttacttgactagcgtaatcatctgttttgtcaaacctttcacactctctacccttattttgtcttttctgatttccctagcttttgtcttttggggtggcaagttttgcgtgtaagataagagtattaaggccaaccaaggccaggtaaagtcaccagtgcctctttgcaaccttaacataagaatgaatctccaaacaaacacttgaaagtgctgcatatcgatcagagacaaaacagcggcacgagctggtcgatgcttttatcagtttcagctttgcgagacggttccataaatcccaattgcaagtaccatcaaactttacagagggaaagcggtcgattcattgctgtcatcttcgtggttaatctaacaggtgatcacttccctaatttcttattttctctcctaattaaacagagatagaacaccttttcttttttgagttgaacagcaatttgactaaatggtaaaacttgtacattttctttattctcgatggggagatctggcttagaaattttttacatatagaactccgattattaatcgttgttgttgttatcaaatttgttcaatttaatgctttattgccaacaaattaagtttagtctttttgagtaatgtgagtacttttctaagcatctaataataagctattgaagctcaatttgcctaaagcaccaaacttaatgctttattattttttgttttataggatacttttacttactttataagaattacaaaataaaatttagttagtgattttatatttgtgaaacttttatattttttaaatattctgtaaattattaaaactctattatcttattacagtatttgtttttatgataaggaagtggaaggaaaatgaaaagaaactatattatttttttaatgtttatttgagtgggaaaaaaagtttcaattctaaggcccatgagaaaatataattccttccctcccaaatttggcatgaaagggttgaggggaaaaatgatctcttactcatttttatttttgtttttttaatatatatatatatatatatatatatataacatgattttttatataaaaaataaatgatttcaccttatgaaaaatagttaaatataaaaagtttgtcttttaaagttaattgtattttttttaattagaatgataaatataactttttttgtaaggcctgtggctctttcgtgcttccataagcatcactatgagactaacttaaacagttagcccttttcccctttccccctttttcaaatatgcaaaccgaactcgtctatttattttcacttatctaaataattacaggaaaaattctctacgtttttcttatttccatatatcaaaataatacattttttctattcttttaatattttgttttttatctttcttatttttttctctattttatttctaattcaaatagaacattaatttgtttctatcgaatctttgttacccataataaactgtgtgtagtgtatacttgtaggttttttttttttaaaaaaaaatccttctgtctgctcaattaacaaataattctaaatcatttaatattctcttactaattttcctacattctttatatgtaaatgttctatatcttcaaacaaaatatcccggtatacattaactaataaccgaatactctctctccgtcttaagtatcgatctagattaatttatccagataaaaaaaaagttaatacacgtatgaaaaaataataattttacaaaattaaatttattaaataaattaaaaaaagtactattggtattacattaaaaaactaaagtgaaacttactaaaagagaataattttaaatttgacttctggatatataattgtattaaatagttgtatacataatttctatccttgtacaaaattgtctataataaaaaaattcatgtgatttataccaattttttcccatacccatatatattaatcttgtaaaatgtttaggatatataattaatatttttaactagaactagaatttgaatttttacttaagtaaaaaaaaaactcattttagaattaaaatcacaattattatagcataactaaaatcaacccttcccaattatattttggaaccaattgaccttaatctcaattcaatttgtaaaaaaaaaaagcgtattaaatagaaaaaaatacattaatattttaaaatataagcaatatatttaatacatttttcatttaattaaagaagaagattagtaagaagatattgtaagaaaaattgtaattattgtttgtttttattttttttatgcaatagaaataatagattttatatgattatagaaataataaatttaaacttaagatttcgtgcaaaaatttcaaattctctcacctcattacatgaaatatagtatatcttttatttttttcattttgtgtgcaagttaaagaacattaattacattaaacaatattactatcattgttcgtatttataaaatctaattaaattaaaaatacatctttattcattactatttccgttcttatttataagatccaaattattaaaaaaacaatttaaatatttaattgaatatgattgtttggtacatccttaattgaatatgtttaataatttcttaagaaatgtgtggataatagttaacatgaggcttattttctttttattaatgctaatacttattaaattatatattttcatatttttgagatgccagatgtattggatttttaatttttaatacattttacaaaatgtacatagaaagtcaatataaataatataattaatttaaaagaaatagcattgctcatttactattttactaaaaatattaaatttttgccttatgtagttatgaacatttaatgtaataataaactaattctaatgtatattatattgattattgaacttctttaaaatatattcttaagggccctcgctatatagggctacacaaactacactcttcttggtcgatctcccacatttttctctacccctcgcgcgtgttaaattttttgaaatcctggttttgcagagaagctatagagaagaagattgcggcttgtgaacttaaggatttaagtgaagtca

SEQ ID NO: 5 - DNA, 5966 bp, Glycine max
tcgttgaaaacagaaaatggtgatgagaatgtatttggttggatttttgaaaacattttcagtgaaaatgaaaacagaaaataaccagaaaatgaaaataataaaatttcgttttcagcgttttcaattgaaaacaagaacctcattttggataaaatgaaaatgagatgaaaataaatgtaattttaagcaaatttaaaaatacaaaaaaagtcaatatatcataaattttcaatatttttatttcctaaaaacagaaagcaaaaagttaaaccaaacatatttttagaattctaatctttagaaaataaaaacaattttcaaaaaatgaaaataaaaaataaaaatataaaccaaacacacaatatttcagcttgtgagtgcaaaacatatgcacgtttttcatttaagtatttctacagataactagacgaattgaaagttgttataaattttacttcaacaaccaccttaaaagggacctccgcatgatgatgaacgccactagttagaccatctctaatctctctgcattcttgcatgataagagaataatgaataattctaacataaaattagcttacgacattttcgcctctattactaatttgctagtattttatctttatctacctagcttgcattctgcatatgaaatttgtggcatgtaattttattaatgctatttaaaccaatgaatatattgaagctgcttctatgaattttactttttaacctaacatcaaattaatgacaaagaaaaggttcaaaaaattattttgaagcactactcgatcagaaaatggttcaatgaaatataaatgcatagctacagtggtgaactaagatctataatctctatatatccttatatattctttcattgatattcctcttaaaagtacatccaattgattgaagccttatctttacatgtataataaataataaaaaattagagcaataaacatatttacagattaactgacttaattaaagacaataaatatactaaacaaaaagaataagactataagagcatgtctcattattattaaaggtaattttgaaaataatatataaatttaggataaattatatatataaaaaggaacaaaaggcagcggttgattattaaattagttaatttgttgatgacttgtaaatcatgagaaactaaagaaaaataaaaaaacacctcaaacttccaccaaatcaccatatccaccgacagccaaatcaagtcataaaatgtcgatgaacctccccatctaccttgatcatgagtttgggattcaattgtagtgcattgacacctcgctttcaaagcaccctccagcctaatttgtagagccagtcaaacttgattctctacttttacctttatttaaaaaatcgtgcttaatatataatgcaagtttatagtatacccattccctttcttcacaaaaaaaaaaaatgaggaaatagaacattaagtactaggaatagacagagaagtctttcttaagttgggactgggatctcccgatctggtgggcggtactgtagcttaataaatctgactggggctattaggtggtgttttgtttgggagtttatttttttattttttatttttaaatttttaagatttataagatatgtatcaataataaattactttaagtttaagatatcatgatattttttgtttttcagaaaaggctaaaaatattgattttttgttttcagttttggatctatttttaaaagaaaatatttttaaaattttaaaaaaatacatttttattcttattttttttatttgaaaataaaaacaaaaaaacactcaaatcacgcatcattctagattttgagtgtctttttttctcaatgacaagagactattaatattttttagttcacttggtcataaactaattccactattagattttgagtgtgtgttaataaaaaatatttattaatcaacaatttttttatcaacaaatattaattttattaatagagagaatcaaattcacaattttttttaatcattcaacccacctcatatctcccaaatctatcaccagattaaatctttctaccatataagaatcaaatttaaataaacacaattattatttagtgactaattttgtcttctaaaattagtatataagaaaatttcatatttaacagctccaataagtctcactatgattatataccaaaattaaactcttagaagaattgttactgaaatcattaatatatatttttatggagaaaccattaaatttcaaaagagtctttctattataaattataatttataaatatgcttaatcaatatttcgcactaataaataatagaatgtttgcttataattaatttaatttgcgacgctagggttgagaaatacaggagttaaaagaagttgttgagttcagtggacctaggtcacaaaataaaagttaaattaagcatgaatgatatcgcgctctaactctcttctgttcacgtatatccatttacaccagtcgtccctccataaatgcttctacaccctctgcaataactccatgctgccaaaccttctctcacttgttctatttatctcctcctgcgttgtttcgttctgtctctattttgctttggcccaaactaaaactccatcaactactccttcacttccctaattccccccacacccattcttgtttctaccgttccagtcatcatcaacataactaattaaggtttacaccactatcaaacgcttaaggtcccctctcgcatatacgcgtgtttaattttagctttgacttgctttgctttgcttagcttagttaatttctgagtgagagaaaggggtaacggctacgtcccccgcattgaaattggttacttgactagcgtaatcatctgttttgtcaaacctttcacactctctacccttattttgtcttttctgatttccctagcttttgtcttttggggtggcaagttttgcgtgtaagataagagtattaaggccaaccaaggccaggtaaagtcaccagtgcctctttgcaaccttaacataagaatgaatctccaaacaaacacttgaaagtgctgcatatcgatcagagacaaaacagcggcacgagctggtcgatgcttttatcagtttcagctttgcgagacggttccataaatcccaattgcaagtaccatcaaactttacagagggaaagcggtcgattcattgctgtcatcttcgtggttaatctaacaggtgatcacttccctaatttcttattttctctcctaattaaacagagatagaacaccttttcttttttgagttgaacagcaatttgactaaatggtaaaacttgtacattttctttattctcgatggggagatctggcttagaaattttttacatatagaactccgattattaatcgttgttgttgttatcaaatttgttcaatttaatgctttattgccaacaaattaagtttagtctttttgagtaatgtgagtacttttctaagcatctaataataagctattgaagctcaatttgcctaaagcaccaaacttaatgctttattattttttgttttataggatacttttacttactttataagaattacaaaataaaatttagttagtgattttatatttgtgaaacttttatattttttaaatattctgtaaattattaaaactctattatcttattacagtatttgtttttatgataaggaagtggaaggaaaatgaaaagaaactatattatttttttaatgtttatttgagtgggaaaaaaagtttcaattctaaggcccatgagaaaatataattccttccctcccaaatttggcatgaaagggttgaggggaaaaatgatctcttactcatttttatttttgtttttttaatatatatatatatatatatatatatataacatgattttttatataaaaaataaatgatttcaccttatgaaaaatagttaaatataaaaagtttgtcttttaaagttaattgtattttttttaattagaatgataaatataactttttttgtaaggcctgtggctctttcgtgcttccataagcatcactatgagactaacttaaacagttagcccttttcccctttccccctttttcaaatatgcaaaccgaactcgtctatttattttcacttatctaaataattacaggaaaaattctctacgtttttcttatttccatatatcaaaataatacattttttctattcttttaatattttgttttttatctttcttatttttttctctattttatttctaattcaaatagaacattaatttgtttctatcgaatctttgttacccataataaactgtgtgtagtgtatacttgtaggttttttttttttaaaaaaaaatccttctgtctgctcaattaacaaataattctaaatcatttaatattctcttactaattttcctacattctttatatgtaaatgttctatatcttcaaacaaaatatcccggtatacattaactaataaccgaatactctctctccgtcttaagtatcgatctagattaatttatccagataaaaaaaaagttaatacacgtatgaaaaaataataattttacaaaattaaatttattaaataaattaaaaaaagtactattggtattacattaaaaaactaaagtgaaacttactaaaagagaataattttaaatttgacttctggatatataattgtattaaatagttgtatacataatttctatccttgtacaaaattgtctataataaaaaaattcatgtgatttataccaattttttcccatacccatatatattaatcttgtaaaatgtttaggatatataattaatatttttaactagaactagaatttgaatttttacttaagtaaaaaaaaaactcattttagaattaaaatcacaattattatagcataactaaaatcaacccttcccaattatattttggaaccaattgaccttaatctcaattcaatttgtaaaaaaaaaaagcgtattaaatagaaaaaaatacattaatattttaaaatataagcaatatatttaatacatttttcatttaattaaagaagaagattagtaagaagatattgtaagaaaaattgtaattattgtttgtttttattttttttatgcaatagaaataatagattttatatgattatagaaataataaatttaaacttaagatttcgtgcaaaaatttcaaattctctcacctcattacatgaaatatagtatatcttttatttttttcattttgtgtgcaagttaaagaacattaattacattaaacaatattactatcattgttcgtatttataaaatctaattaaattaaaaatacatctttattcattactatttccgttcttatttataagatccaaattattaaaaaaacaatttaaatatttaattgaatatgattgtttggtacatccttaattgaatatgtttaataatttcttaagaaatgtgtggataatagttaacatgaggcttattttctttttattaatgctaatacttattaaattatatattttcatatttttgagatgccagatgtattggatttttaatttttaatacattttacaaaatgtacatagaaagtcaatataaataatataattaatttaaaagaaatagcattgctcatttactattttactaaaaatattaaatttttgccttatgtagttatgaacatttaatgtaataataaactaattctaatgtatattatattgattattgaacttctttaaaatatattcttaagggccctcgctatatagggctacacaaactacactcttcttggtcgatctcccacatttttctctacccctcgcgcgtgttaaattttttgaaatcctggttttgcag

SEQ ID NO: 6 - DNA, 456 bp, Zea mays
aagcttgctttcacatctcctccggtcctcctccatgtgtacaccaaacaaaccaagaagaaaaaaatgcatggttttgttcccgatttataccttggagcaacccttccattctcttgaaattttctttgtcgccccttgaacttccccccatatgtccagtccagctacaaattaatggcgacgagcgatgaaacgcacggaacatatatgcctcagcaggcaaacgtcccagtcgtcgatctctggcacttaattaattgtttatattaattccaactcgttcgtgcaacggtgcaaacaaaacaagctgacgatgtcgagtcgctgtttccccttccaccttaattgcttttgcagccaaacctcctgctggacaaccagcagctccagctactgcagcagcaacacctgctggaccagatcccggcgacgacggcggagagcggcgacaac

SEQ ID NO: 7 - DNA, 3000 bp, Oryza sativa
ttaaaaaaatctggaaaaaagaagcgatttaaaaaaggaaacaaaaaagtgacgttaaaataggagatcttaaaaaaaagaaacgcgtagggatgcagctggtgcgcgcgccggctcctttcccttgcgcgcacgcgcgctagcatcccccataagtttaacccataaattatatttgcttcgttcgtttctcaatggcttgttagtcataggtcaatcaatcagagtctagaaaaagaggtaattttttccattgttgagaagatattaggagatactatttttttagtgtgaaatttgatatctatactagctatctcggtataaaaattactttaaatgtaaaatttagatgcctcaatatatatacttttttaagaaccgtataatttctcatagaaaaaagcaatgaagacggacatgactctcattagtagtgtacttttttttttcctaatccactatatagtgtaccattatccattaatttcttttatcttttacaactttgattttgagggatttgcatactgttttgaaaggttgattgtggttatttctcacttgattagatgcatgagtttttaaaataatttaatttcaagtagatacaatactcatgtatagatgatataattgtgtattattccctccatcctacgtatttttagtgtttaaaatttgttagcatttcttgagtattattttcctaacccacctaattaaccactgaaattatttctcactagtttgcatcgctgggcatgatatttcttattaaggatgtgtttagttcacattaaaattggaagtttggttgaaattgaaacgatgtgacggaaaaattaaaagtttaggtgtgtaggaaagttttgatgtgatagaaaagttggaagtttgaagaattattttgaaactaaacacggcataaagtgaactctcgggaggccgggggcatcgtgaaataaaaaagaaatgttggatatcagagaaggggctctcgtattgaaattttgttaagaggggtgagtttcgaatcgggatcggcgagcccatactttaagaggatatcttgaaataatttcaccgtaaccttaatttacgctaaaatccctaaacatatttatattcgtggacatggcgagtacatgccacgtttcttctgctagtaatttttcacataaatttttttttctcagcaagaaaggctggctatatactccagtgcagaaagagtgaaaaagactacaccaaacaagcatgaggcgtgtggaggcatgaaaacagtacgtacccagggcacagcagtgaaaacatcgatctcttcaccctgcatggtgtctccttaaaatctgatcgatcgactcccaaaaatataagtaaaatactcgagtcaaaatgcatcagtttgcatgcatagtgaaacagcagcaagctggtcttccacaggatactttttgacccattcctcctatacatgcatgtaattaatcacaaagttgcaaaaaatacaatactatgattgtgtatttgtgtgtactatatataaaacaaataaattaacctagtagtaactgatcagtatcgatcgagagtcaacaaaatatatgtagactacgacgatacgtgtgtgccttcctgttttcttttgttcttatctttgggccgcactatacgctgcatctatactaaacagtagtgaaaaatctacctctccaccactcaattattacgccggtctataataattcgttgtataaattacggggcaacagtgaattattcatgtgctcttgcgtgtaggattgccaaacaactgtttcatggtcagataaatgaaaaaaaagcgacaaattggtaacaataaggaaatgttaattaatttatgacatgtattactttcattaaaaatataatagtttctgactatacatgtatctcggaggtacataaccaaaaattcttagaggaagtataaaaaaaatgttttcttgttattggctacgaggtctcccaaaaatccaatgttgtacaaatactatattacatgtcaatttgaaattgtgttaataagtaaaaaaggacactccaatttctccatatcctcaattgaggaaatataaaaacaaaatttgtttaaaaaaatgtttcaggaagtataaaaaatgttttattgttcttggctatgaggtctcccaaaaatccagtgttgtacaaacactatattacatgtcaatttgacattgtgttaataaataataagtcaaaaaaggacactctaatttctccatatcctcaattgagggaatataaaaacaaaaattggaattgaaagttgaaaccatgcaccactagtctctctctctctctctctctctctctctccccttccatctctttctctcccctagcaattacactacgccttctccataaatgcgattgcaccctctcaacactccgcggcaataactccttcgcccccctctccacattctcttccacctgtgttccccttttcttctcctcttcttcttcctctcctcctcctgatcctgatcgagaagatctcaccttgatctcttgccgtgtgatctctagctctcgctagccctctgaaccttgcagtttgttgtttgcacccggtgaaacatcttcttttgtgcaggtaggagagacagcaaagcagagataagagttctatatttgcatgtagttcttgtcttggatctcactggctggctgtctcctctctgcagcaaggttcgttgggctagcttgtgtgctagatctgtttctacttgcgtttgcgttgcttggcaagcaagatatatatatatatatctatatctatctatctatcattctatctccctacatatttagagctagcactttgtgtgttctttgggtttgggacacactcatatacgcgtgttcatgagtggaaatggaaggagctgcaagggcaagaattagggtttgagatataggagtata

SEQ ID NO: 8 - DNA, 3000 bp, Arabidopsis thaliana
ttctgatcgaaaccgagaggataatttggaataagtaataacgaataatttgttaacaagtcgctttttatagattccttgtgagaaaacgtctttatcatatcaaacgatttttggtgagttattaatcttgtcgcagcattaagcatatatgatgccactttaggtcgtcggttacgttaattaacttacataaaattagatccaagaaaaaaaaatcttgcataagaaaagaagaaagaactagtttatttattaagctgtgagtttatcctaaaatatagtttggcttgtaaactagaattacatatagcagctgcaaaaaatgatggtgatgatgattttcacattgacaacaacaattatacaacgttatgatggtcgtcaatcgatatcaactcgaaaatataatttagaacttttgcatatacataggcacacacatatttttgtatgtatgaacatggtttagtgtatagttgatagtttaaagacattgattctttgaatggtcggagcttttagtgcgtttggttggtcggatcgccttgaaagctaaaaaaagacaactttgtccgtatgtgttgtcctagttttggagtaatttattttcgaccgttttagccattagcggaaaccacctaactctctctatcaaatgttctttagcgttggtccgttgcaaacatttgatcactgtattaataacatcgaccatacgatgctgttttgttcgtaccaaattcaccgtagtaaacgctgaaactttttttatttttttgtgtgtgtgcgcacaaaacgctgaaactagttaaaatataaatatattggataataagtataaagtacccaatatatttgtatctatttatattcgtgacatttgaatcgagttttacatggtatcggagtaacgagacaatcgataccatattattgctttgacctaccagttaatcaatatatacatatttcaagtctattaactcgtaagtctaatacaattagaaaaatgaaaaaaaataaaagaagaagatatatatggaaatattggcatttgtcttaataatgtaatcaatcatcaattgtagaagccaaaggcatctctagtgtcaacgaatttgaattgatataccaactaacatactttcaaaaccggtagattatacggtattggaagatgatgaaaagaagagtttatttctcttcaaaagttacaaattatataaatgtcatataccgtaagatgagatagttgaatattcacgtggtgtttatagtgtctacataggtaaaagacattaatcatacaatcgtattaacaaaattgattgtaaaaaaaaaaaaaaaagggttgattgtaagttcgtaacctctatgtggactgtgtggcccaaaccaatcggtcggaagctacaatactgtgtccgaatcctaaaaggctaaaaactgactcggaccagcttagagatcatatgaaattatggatagcggaatagctggcaacttcaatgaattctgaatttaaaacatttttttttatatatatagatgatttggcgattttcgaactggaatggtgaaaaagtggttgagtacactattagtttatttatttaaaaaatagagggaaattcaaatgaaaaaaaaagtttcatctacagaaaaaaaaacacgtcaaaattccaaaaaacttgaacgtcttgaacaacggtataaccgtataagaaagggaacttaaaacttaaacgtctacatgattgaaagggtaaaaatattcatattacaatggtataagaaaatggagaagccagaggagcaactccaaagaagaagatgcagcaagagagtgtacattattataattataagttggtatatatgtagttgctaaaaaaaaaaaagagtgtacaatattttctgaagaagcatcgagctggttaatatttaagacccaccaaaacctaccaacaatgttattctcatctctaagcaaaagtttgatctcatctttttttttaattttttttttgatgggtcctcttctacctctgcatctccacgtgctatacaagtggcctcgctgtatgtattatttaccactctcttattgttactaaaaacttgaatgtcacttgaatgtcacttgaatgcaaactatatatttaggtgaataccagatcaaatagcaataaataaaccaacaatttatgctaattaaaaacttgaaaaaacactttccattacctatgattttttaatccaatcttggggtttgatgcccataaaacgaagtcgaaaagagaaaagcgaccttaattgtaataaatgcagctattgacttctctatcaacttcaagtcttcaagtaactacaaatttaataatctccttagcttatcttagagaagcacaaaacaaaagggtctacgcttagtcttcctagattcttgatttgagtcttgatggccacttgctttttatgtctcaatcctaagagttgatacttacttagtattaatcaggtttcacattatctcagacctagcttgcatttttgatacaaacatgtcatgcaatacacataagcaacacgtaccgagtcattgattgaaaaacatgacctaaatagtaatacggactgagagagagtgatgaatcatttcatatgggagacagctttctcatacgcgtccatgcctttgcatgaaagattaaataattcaactctttcacttatcttattttaatttactttgcagaattccaagttttattgcaatcaccaggggtattaaatgggatagtgtaaatgcacctgcaacacatcaactaaccacacactcctccacctgtttgtatttacttcaaaaacttaattcaaaaatccctttgcttctttccttccctctatttataaaccctagtatccggtttttattctaccacacaataccatttgcaacaaacttctctctgaatctcagtgaattctcataaa

SEQ ID NO: 9 - DNA, 2546 bp, Glycine max
aaaatatattaaaagcgtgagtttatttgtttatactttttgcaatatctatatttttaataataaattaagatcttcaattttattatacaatatttcaagattaattgaaacattttttttttcaattaattcccgtccaaaattttcaattgtctaattattatgactgcttagtcttattaataaaaataataataaatgatgtatcatatcatattaagatttatcaactataatttaaattaaaataagtgtttttttaaaataaaataaatgattttataatttttttgatgcatttgtttaattttttatttaaaataagtaattttttgttttcttaaaaccaaccctatctgcttaatcatttttctaaattttttcaaaaaatttaaacaaattagttcataatattttatgactttaaataattcagtaccagcaactgcctcattgactttgcacttgccactgtcctgcctttgcacgaaaaataacatataaataacgcgtagcactgttttctatatctaaattagtctatataaaacataataattacataaatattcggagattttataaacaccgacaaaaaataaagtttaaagtttgtgatttttatgtcaatttctttttattcataagaattgaactcaaatataaaaaaaatttataacaacgtacaactaaattagactcattgatatttttatgtgaaatttaagtttaaccaaacaatatttatctagatatatgcataaagaaagagttttttttttagtttatacttagaccaatttttattttattttttatggaaacttagaacagatgttaatgagcagaaatatcaattatgaaataaaaatacaagtaattaatattttattttagttcttatagctcaattttttaataacacttttttggtccttgttctctaaaattatttaacgtaattacatttagatcttttaaaagtgttacaaaactgcaacggatagtgtaaattaaaaccgctaaaaagagatttgggtaaattttaatggtcataaataaatacaacaacaacgccttatcccactaggtgagtcggttacatggatcaacttccgcctaatcgtcataaataaataaagaaaagaaaacaagactttgttgtgccatcaaccatggccaaggcagaatcacgcgtgacaaactttcataaacgaattgagaaccttattggcattgggtcagagccatcggcgactgtgcttgttttgttgacggatttacatcatcaattccagttttgtaacaattttgaagaatatggatgtttgcattaggcaactttagacatccaataccaaaaggtttaacaattgtaactatatggaccaaaactcctattttaaacaataggtatcaaaagctaattaaacttttattaaaatagcaagcctaggaagcatacgtgtgtatatactaaaattgctgcatgagtgaactacacaaattcaatataattgttcaccatacttcagacaaaataatgttggcccagtcccatttaatgtaagactcaaaatctatgccagttgacccgaaccacacacaaacaatggtagaaatttggagtacgtatattggccacagtagcctactcaactgaaaagcaaccaacctatgaactttgctagctgtttccaagccatagcaattaaacttttccccttttacttttattttcttgaaatttttatgtaccaaggtgggttggaaatttcaaattggtaaatcaggttaattcctttctattagctaggtgcactcaatcttccatgtttatatacactataacattttatacagcatcaccttctgtatgtctatttattaatacagaaaagcatacacatactatgtattgattgccacagcctggtacaatcagccacaactgtttctcaaagtaacttgtatattgatattcatttatacctaagggtatgtctctatcctgctcccacaaatgtgggggaactgtgttgtagatttcactttcaagcgattgatattatatgttcaaggtaactcccctaattaatatattgaatgagacaatttgtgtaatgctaaataaggtttctatatcctaaacttctttagagtaaacatatgctaagaaaatggggtgtaccttcaattagtaccaaatttgcacacaagttgcttaagcttaattttgaaaaaaaataaaagggtttggagagagaggatatttggatgtattagacatgtgctcaaggttttttcagaaaatttcaggctatattacaagaagtagtgaattaatatcatgagtaaatgcaccctgcaaaacatcaactaaccacacactcttcccacccgctaatatttacttctcacttctgtgaactgttttatattccatgctttctcccttccccaaaccacacttcaaaatcctctggtaacccttattttatctattctctctctttcttttgtgttctaagcagctagaagca

SEQ ID NO: 10 - DNA, 2500 bp, Glycine max
aaaatatattaaaagcgtgagtttatttgtttatactttttgcaatatctatatttttaataataaattaagatcttcaattttattatacaatatttcaagattaattgaaacattttttttttcaattaattcccgtccaaaattttcaattgtctaattattatgactgcttagtcttattaataaaaataataataaatgatgtatcatatcatattaagatttatcaactataatttaaattaaaataagtgtttttttaaaataaaataaatgattttataatttttttgatgcatttgtttaattttttatttaaaataagtaattttttgttttcttaaaaccaaccctatctgcttaatcatttttctaaattttttcaaaaaatttaaacaaattagttcataatattttatgactttaaataattcagtaccagcaactgcctcattgactttgcacttgccactgtcctgcctttgcacgaaaaataacatataaataacgcgtagcactgttttctatatctaaattagtctatataaaacataataattacataaatattcggagattttataaacaccgacaaaaaataaagtttaaagtttgtgatttttatgtcaatttctttttattcataagaattgaactcaaatataaaaaaaatttataacaacgtacaactaaattagactcattgatatttttatgtgaaatttaagtttaaccaaacaatatttatctagatatatgcataaagaaagagttttttttttagtttatacttagaccaatttttattttattttttatggaaacttagaacagatgttaatgagcagaaatatcaattatgaaataaaaatacaagtaattaatattttattttagttcttatagctcaattttttaataacacttttttggtccttgttctctaaaattatttaacgtaattacatttagatcttttaaaagtgttacaaaactgcaacggatagtgtaaattaaaaccgctaaaaagagatttgggtaaattttaatggtcataaataaatacaacaacaacgccttatcccactaggtgagtcggttacatggatcaacttccgcctaatcgtcataaataaataaagaaaagaaaacaagactttgttgtgccatcaaccatggccaaggcagaatcacgcgtgacaaactttcataaacgaattgagaaccttattggcattgggtcagagccatcggcgactgtgcttgttttgttgacggatttacatcatcaattccagttttgtaacaattttgaagaatatggatgtttgcattaggcaactttagacatccaataccaaaaggtttaacaattgtaactatatggaccaaaactcctattttaaacaataggtatcaaaagctaattaaacttttattaaaatagcaagcctaggaagcatacgtgtgtatatactaaaattgctgcatgagtgaactacacaaattcaatataattgttcaccatacttcagacaaaataatgttggcccagtcccatttaatgtaagactcaaaatctatgccagttgacccgaaccacacacaaacaatggtagaaatttggagtacgtatattggccacagtagcctactcaactgaaaagcaaccaacctatgaactttgctagctgtttccaagccatagcaattaaacttttccccttttacttttattttcttgaaatttttatgtaccaaggtgggttggaaatttcaaattggtaaatcaggttaattcctttctattagctaggtgcactcaatcttccatgtttatatacactataacattttatacagcatcaccttctgtatgtctatttattaatacagaaaagcatacacatactatgtattgattgccacagcctggtacaatcagccacaactgtttctcaaagtaacttgtatattgatattcatttatacctaagggtatgtctctatcctgctcccacaaatgtgggggaactgtgttgtagatttcactttcaagcgattgatattatatgttcaaggtaactcccctaattaatatattgaatgagacaatttgtgtaatgctaaataaggtttctatatcctaaacttctttagagtaaacatatgctaagaaaatggggtgtaccttcaattagtaccaaatttgcacacaagttgcttaagcttaattttgaaaaaaaataaaagggtttggagagagaggatatttggatgtattagacatgtgctcaaggttttttcagaaaatttcaggctatattacaagaagtagtgaattaatatcatgagtaaatgcaccctgcaaaacatcaactaaccacacactcttcccacccgctaatatttacttctcacttctgtgaactgttttatattccatgctttctcccttccccaaaccacacttcaaaatcctctggtaacccttatt

SEQ ID NO: 11 - DNA, 2829 bp, Sorghum bicolor
tctcctccgactctggcctttgtgtgcgtctggactctggagtgaatgctaatgaggtttagtagacgaggtgctgtgcagatggaatggctactcacgctgacatttttcaggtgagagatcagagttggcaagggacgaaggaatggaggttgggatgggatgggatgggatgggatgggatgggggttgagagggactgacagcacgccaagctagctgaattaagcaaagttaaataagcttatgttggattagtagttggcatgttgggcaggaaagcaatccaggttaaaaattgcttgagggttgcaacctgcaaggctttgcttcagagtggctcaaatttgggtaggttttgatggcactcttttgattttgacaccaaatctttctcgcgacattaactatataatttcctattttaaccactttttagaaatgaaaattattagcacaataaagaagcatttgtaatgcgatatttttttttctgaattctcaagttttttttagatgaagatccttcaaagttgaaatttgttagtaccaaataagcccataaaattggaatgagcttaacgtgaatattccccggacaacctagtcatgacacttgttttggcagagtgaggacccatggtgtttggcattgcagcacagtaccaatctgccactgcctgatgagtgatgatacaagagcatcatcgaaaagcaacagtagatgacaccaggttttggaagggcagccagcagctttctgaccaccaccagacgtatatgaaacaaaagcaatcaggagagcatatcaggtttggtgagaaaagttgtgttaacaaatgaagactggaattccttgactgatcgcaagatgctaccagcagcaaacacttagaatgtaagctacaggcgtgtcaggagctaaagttttgcagataggaggtggctctcagcttctctctccgttgccttcaagtgaagcctcggcaaaaccgggcatgaaacacgcatcgcccgccccaattccttgtgcagtccaaaaggaccagaaccatttcacagtttcacagttgcattgacaggaagtaattcgaagacacgacataccgacgccagtaacaatataccataaaaagcatgggttgatgggttggtcatccaaacagaagattagctgataaacagacaaagggatgtgaaaacgaaccttttatggtagcaggtagcgatggcaatgctctatcttcttttgcagattttctcatgaatatcactgctaaagccagttttcatcaactccataaatcgaaagcgaaggggcataacatcagttcctccatactttctacccagtttcagtatttttgtgcggtcgtagctaaccgcagggagcattcttttggcacattcaactattggaattcgatgaccatgccaaacatcttaaaaccttccatcaaccgaaagtacaagtacaacatacaacggatatagatggaaactttcgttcataaagtttggtatcggcaatgtatttactaccacttaacagatgcatctctggcatccctgcagtaaagaagcagtaataggaacagaagaaaggttttacaaaatctcacgggtatcatgatcatcagttcattgccaggtgtgaccatagataaaccacagcaagatgtaaccaggatcatgcagtcccgcaccagtaggctaagtgctcgtccttgcgagatgtgctaaagagcccaccacatttcaggcagatgaagctgctcccatcagcaaacgcatccaggatgatctgcttccttccactctcagcaagaatgcaggcctcatcagaattcagcatatcgacagggtctgacccaggtccttgtgaagggttagtatttgttgactgagcctctgctatggcacattgggcaagcaaagaggcaagctcatcaacactaggagtggcctgcaatctctgcgcatagagttcacgcgcacggttcattgtctgcatgagcgcttgttcaccaccttgagatcttatggccaggagaacctgcatagtttcataacatgagaatcaatataacagatacagatgaatgggcatgaaatgagacaaatgagtctcaacgaaacaagataaagttcaaaaggttaataattaccacaaggctcatcattgggatctatacgaacaaaattgaaacagccttccagaaggaatcaaaatagaaattatgcatttcaatagaccagaatgcttgtcacattaccaatgtttgattcattaccagaacaaatcctacagtgttattatgagggacacatcaatcataagatcccacaggaaacagctaaggcataatcttatattgcgtaaatgttggtctaaaaaaatcagttacactaacataggcacatagctatggtgcaggcaggaagcactaatgacagagtgtggtgttgcagttgagaagtaattagcctactactccaatccacagagaagacgtgcatttcattcgatccatgtgatacatcaggtaatatgctatacatgtctaatccaaacaagatacggaaattccaatttaaccatcgcacactaatacatatagagaaagatttgtttaggcctatattgccctgtactcctgtgtaaatttagtacagtatactcaaataattttatgagggtaccaaacactaattgtgggctgtggctttcttcttcaacttttcccaaaccaaccttctacttttacccttactcaccaatataagggctcgacggtcatttttaacaggtcaaatccaaaatgattg

SEQ ID NO: 12 - DNA, 2567 bp, Oryza sativa
aggtagcataagaccatcatctttttccctttctaatatattatactacctctatattttaatgtatgacgccgttgacttttcgtccactatttgaccattcgtcttattcaaaaaatttacttaattatcatttattttattgtgacttgattcaccatcaaatgttctttaagcatgacataaatattttcatattttcacaaaaaatttgaataaaacaaatagtcaaacattagtaaaaaaaatcaatggcgtcctatattaaaatacggagggagtagtttttctaaagtatcctgtgaatcacacgcgcatatgtagcttgcatagttacacaaaatatgcctcctttaaatgccggagctaccaaaatgggctcataatagcctgaaattaagtagtcccttcaccgacaaaacactagttactactgtatcatcaacaacgacctgaatttacagtaggggagaaacagcttgaatataagctgaaataagttgaacccataccatcatcgctagtgaagagtttgattgcagataattagttatgcttagtataaaatgcaaaaatccatctgatctataacaataggtaaataaatcacatctctaatttatttacccatgctggttctttcagaaataatatttaaatactttgaaagttgcgttgaagacagtcggcccggatattaaggttcaactttatttcttttttcatcaattagtttatgcaattctgcccaatgatattgttactagtaaattttacagacagtagccaacactgtggatttatttattccataacccatgagagagatgtgataatatgcacacactactaattcagtacagtgatttaatatcacttatatctcatcatatcttggatgtcatgtagaataccaagtcaatgcaaaatctattttctttttttttcaccattaaatctttcaccaaatcataaaaaatcttatgtggcggctagctcatttaatcctatgtaaaacatcttaggtcgagtattaggactgtgccaacagaaatactatgtgctagcccagctttcaggggcccaacaatcaccaaagtaactctgcccttcggaaaattaaaggcagccactcagacacacagtgatatccagcaaatgcacgacggatcacatggagtttcagccccagggccaatcacatcttgcgcaagtacagccgttgctggtatcttcaaccattcctctattatctcctggcctggtcctgctcagctgcaactgtaacggttagttcagtcccatacttcttccgtttcacaatgcaagtcattctaccatttttcacatttatattgatattaatgaatctagatatatatatttgtctagattcattaacatcaatataaatgtaggaaatgttagaatgacttatattgtgaaatggagggagtatgtacgtatggtttcagagagttcgactgttccagaagttaagggcaatagacagttggatgcaggctactagtcattacctggtaattttctgcctttttttgtggtcattgtaagtaattcttgacaggagatcacacatgcatagctccatttcatctgcaatgtcagacgctgtcaagattaaggagtaggagttttgtttataggagggacgaaaatgtgagtgatggatagcatgatgaaatcgcaggtgcgatattgatgaatgactgcagcagcattacactaattgctatatatattttttatttaagagcagcaaggtctgtttgtaactaaaacagaaatgttttcaattaaaaaaaactaacagcacaaggtctacagcataccaagtaaactaacgctagctagaagcagccagatagatcagaaaaactcgaaaactttgcagcacaattctgtaatgtaatgtgctgataatgtatagcatgaaagactgcggcacaaatcagttccaagaaacttacaagaattaacaagcggaattagaccaaagcatcgctttttacacaaaaacaattgtaaaatcaaatttggtgcttccacataacaactgggccagggaatcttaccatactgtgcttccattaaattgagaaattcaattttgccaccacagcatgaaatccagctcgaggcatggttaagtgtactgagtaggtggcaagcaccgatccccattaaatcagcagactttcggggaggaaatccattctgcatggaaagaagactgccaatatccatggaagctaaaagtgccatggcctcgctctaacctacaaatttggacacagatttgagttaaagaactcacaatggaagcttcatcatgtgaattgaaagcgagcagatcaccgtcatgctgaactagctggacgaatcaaaccattaaatgatagacaactactaacagtgtcaatggaactgtagagcatctttcgcatgtatatataggcgcacaaaggcaattcagttcatcagctcaagcacctcaaccagttcagtcatccattctgtcttctctgcagatactgagagccaag

SEQ ID NO: 13 - DNA, 2500 bp, Oryza sativa
aggtagcataagaccatcatctttttccctttctaatatattatactacctctatattttaatgtatgacgccgttgacttttcgtccactatttgaccattcgtcttattcaaaaaatttacttaattatcatttattttattgtgacttgattcaccatcaaatgttctttaagcatgacataaatattttcatattttcacaaaaaatttgaataaaacaaatagtcaaacattagtaaaaaaaatcaatggcgtcctatattaaaatacggagggagtagtttttctaaagtatcctgtgaatcacacgcgcatatgtagcttgcatagttacacaaaatatgcctcctttaaatgccggagctaccaaaatgggctcataatagcctgaaattaagtagtcccttcaccgacaaaacactagttactactgtatcatcaacaacgacctgaatttacagtaggggagaaacagcttgaatataagctgaaataagttgaacccataccatcatcgctagtgaagagtttgattgcagataattagttatgcttagtataaaatgcaaaaatccatctgatctataacaataggtaaataaatcacatctctaatttatttacccatgctggttctttcagaaataatatttaaatactttgaaagttgcgttgaagacagtcggcccggatattaaggttcaactttatttcttttttcatcaattagtttatgcaattctgcccaatgatattgttactagtaaattttacagacagtagccaacactgtggatttatttattccataacccatgagagagatgtgataatatgcacacactactaattcagtacagtgatttaatatcacttatatctcatcatatcttggatgtcatgtagaataccaagtcaatgcaaaatctattttctttttttttcaccattaaatctttcaccaaatcataaaaaatcttatgtggcggctagctcatttaatcctatgtaaaacatcttaggtcgagtattaggactgtgccaacagaaatactatgtgctagcccagctttcaggggcccaacaatcaccaaagtaactctgcccttcggaaaattaaaggcagccactcagacacacagtgatatccagcaaatgcacgacggatcacatggagtttcagccccagggccaatcacatcttgcgcaagtacagccgttgctggtatcttcaaccattcctctattatctcctggcctggtcctgctcagctgcaactgtaacggttagttcagtcccatacttcttccgtttcacaatgcaagtcattctaccatttttcacatttatattgatattaatgaatctagatatatatatttgtctagattcattaacatcaatataaatgtaggaaatgttagaatgacttatattgtgaaatggagggagtatgtacgtatggtttcagagagttcgactgttccagaagttaagggcaatagacagttggatgcaggctactagtcattacctggtaattttctgcctttttttgtggtcattgtaagtaattcttgacaggagatcacacatgcatagctccatttcatctgcaatgtcagacgctgtcaagattaaggagtaggagttttgtttataggagggacgaaaatgtgagtgatggatagcatgatgaaatcgcaggtgcgatattgatgaatgactgcagcagcattacactaattgctatatatattttttatttaagagcagcaaggtctgtttgtaactaaaacagaaatgttttcaattaaaaaaaactaacagcacaaggtctacagcataccaagtaaactaacgctagctagaagcagccagatagatcagaaaaactcgaaaactttgcagcacaattctgtaatgtaatgtgctgataatgtatagcatgaaagactgcggcacaaatcagttccaagaaacttacaagaattaacaagcggaattagaccaaagcatcgctttttacacaaaaacaattgtaaaatcaaatttggtgcttccacataacaactgggccagggaatcttaccatactgtgcttccattaaattgagaaattcaattttgccaccacagcatgaaatccagctcgaggcatggttaagtgtactgagtaggtggcaagcaccgatccccattaaatcagcagactttcggggaggaaatccattctgcatggaaagaagactgccaatatccatggaagctaaaagtgccatggcctcgctctaacctacaaatttggacacagatttgagttaaagaactcacaatggaagcttcatcatgtgaattgaaagcgagcagatcaccgtcatgctgaactagctggacgaatcaaaccattaaatgatagacaactactaacagtgtcaatggaactgtagagcatctttcgcatgtatatataggcgcacaaaggcaattcagttc

SEQ ID NO: 14 - DNA, 2602 bp, Populus trichocarpa
aacagcctgtgctgtcaaagagaaaccattgtgtattttcttttcattacaaaatctaccatcttactcactagtacaagatctaaatactccaacaagagcttgatcttgttttcaatggtctggtgtaagacaccattaatttatttgaaatggggatatgagatataatcaaatagtggaggttgtgggctagcagggctcaaatctttatggtgtattggaccaaacaaaattggggcaggatatcattgttcttgggctcaatatttgttagcttgtccgatgagagaatgaataggaaggcaccccccccctgtgtctcttctcttccagatttaataaattagaggaaaaaaacttaatgtgccgctcgggaaatgaatcatttctagtggtttaagtcgggaccagctgaacggagtctctgaaaaaaaaaaaacgtagtcctgaattcaaacagcttaaagtctaagagataatgaaacacggtgagggttcaatcccatggcatggagcaagttgagacatgggttttgatcagttttattgaggttggaattgaatgtcacattcatcactcggggatgttgcagcaccagatggccttacaggaaaatcatgtctatgtgcttttgagcctacttctatagtttaatctcagcttgtcaaatgaagtcaacttgatcctacagtatcactgtatatgaacttgttctataatcttgtcatattggtggtgaattttttttctaatgaattttgtgaagaccatgttataaaaagactcctaacaatgcctagatcaccacaataaaatggcatggtgaagaaaaaaataaaattatctttaatatggcgagaaacatacttaaaaccaagaaaatgccaaatgaattttgggttgaagttataaattatgttatttacttgttaaataggttttctatgaaaagcttaaatgacatgactctattataaaaagcatgcatggaatggaagaaagtcaagtgttactcatttgaaagtaattagaagcattgactatatgcatgcagatgatcaagtaaggaccaaattagatgacaaaagcaaaaaataatctttgtgagctataatcaaaagtcaaaataatacaagtttcacaaccctaataaataaaaaatgatgattaatagaaatgtcgaatttgatgaagaaagagcatgaaattagaaggtagacgatgttgagaagtatgaatttctaccagtttttgatgaagagatataaagatcatcaataacttgttacacctccacaatcatcaataaactcaacttcacctttatcctcttcttcttttagtagaagttccagtagtggcagctcacttagttaatatagaaagatgaagagtcttgatgacttgtataagataattaatccaattgatgatgatctatcactatattgtcatcttgctacatgtaaatctttagtgtttgtaaaagaaataaatgatgaaaaatagagaattgctataaataaagagattgcatcaactgagaagaatgacacatgaaaatttgttcctagaccaaaaagaaagaagacaataggctaagaagaagcaacctatagtcacattattaacttgagaagatgaatatgtatctactacaacaagtgtttgtcattccatatggctaagaaaattattgaaagagttatgaatgccacatgagaagcctacaaaaatttatataaacaactcattagtcattgctttaactaagaatccaatatttcataactgaagtaagcacatacacacaagatttaatttccaataagattgtattacaaacaagaaagttgaagtcaaatatataaaaacacaagatcaagttatagatatttttataaagccactcaaatatgatgtttttgtcaagatgagaaatatgctatgagttataaagaaatcaattttaagaggggatgttgaaagtaaactagattttagtttttttgcaaaatagaagaatcggtcgatcggttcagaaacaattaaccaataaagacgacataatacattttcttatttgcctagaacctgaggtttataaataaaattttaatctaaggaataattaatatatgtaaagagaaaatctaaggaataataaaattgtttttttattgaatcctcttcttgttttttagttttacttattattttgctgttaataaactcctgccacacttattattattttttttttccaatataataattcatttcgtagtaaccttggcaaaacctccatggcaatggtggcaattcacacatcagagttcttaaaacgagagaacaatccattagcaagagtgagcttgggcatgtggcgggggttggattaattgcattatcgcatcagtgcaagtcattaatagcacaaattaatgctccggcaacaaatcaactaaccacatactccttcacctgctaatatttacttcactctgtcaactctatataatccccgctttcttcactgaagaatgcacctttcagttatatcccaacttacttctagtgttctccaagaatattgag

SEQ ID NO: 15 - DNA, 2500 bp, Populus trichocarpa
aacagcctgtgctgtcaaagagaaaccattgtgtattttcttttcattacaaaatctaccatcttactcactagtacaagatctaaatactccaacaagagcttgatcttgttttcaatggtctggtgtaagacaccattaatttatttgaaatggggatatgagatataatcaaatagtggaggttgtgggctagcagggctcaaatctttatggtgtattggaccaaacaaaattggggcaggatatcattgttcttgggctcaatatttgttagcttgtccgatgagagaatgaataggaaggcaccccccccctgtgtctcttctcttccagatttaataaattagaggaaaaaaacttaatgtgccgctcgggaaatgaatcatttctagtggtttaagtcgggaccagctgaacggagtctctgaaaaaaaaaaaacgtagtcctgaattcaaacagcttaaagtctaagagataatgaaacacggtgagggttcaatcccatggcatggagcaagttgagacatgggttttgatcagttttattgaggttggaattgaatgtcacattcatcactcggggatgttgcagcaccagatggccttacaggaaaatcatgtctatgtgcttttgagcctacttctatagtttaatctcagcttgtcaaatgaagtcaacttgatcctacagtatcactgtatatgaacttgttctataatcttgtcatattggtggtgaattttttttctaatgaattttgtgaagaccatgttataaaaagactcctaacaatgcctagatcaccacaataaaatggcatggtgaagaaaaaaataaaattatctttaatatggcgagaaacatacttaaaaccaagaaaatgccaaatgaattttgggttgaagttataaattatgttatttacttgttaaataggttttctatgaaaagcttaaatgacatgactctattataaaaagcatgcatggaatggaagaaagtcaagtgttactcatttgaaagtaattagaagcattgactatatgcatgcagatgatcaagtaaggaccaaattagatgacaaaagcaaaaaataatctttgtgagctataatcaaaagtcaaaataatacaagtttcacaaccctaataaataaaaaatgatgattaatagaaatgtcgaatttgatgaagaaagagcatgaaattagaaggtagacgatgttgagaagtatgaatttctaccagtttttgatgaagagatataaagatcatcaataacttgttacacctccacaatcatcaataaactcaacttcacctttatcctcttcttcttttagtagaagttccagtagtggcagctcacttagttaatatagaaagatgaagagtcttgatgacttgtataagataattaatccaattgatgatgatctatcactatattgtcatcttgctacatgtaaatctttagtgtttgtaaaagaaataaatgatgaaaaatagagaattgctataaataaagagattgcatcaactgagaagaatgacacatgaaaatttgttcctagaccaaaaagaaagaagacaataggctaagaagaagcaacctatagtcacattattaacttgagaagatgaatatgtatctactacaacaagtgtttgtcattccatatggctaagaaaattattgaaagagttatgaatgccacatgagaagcctacaaaaatttatataaacaactcattagtcattgctttaactaagaatccaatatttcataactgaagtaagcacatacacacaagatttaatttccaataagattgtattacaaacaagaaagttgaagtcaaatatataaaaacacaagatcaagttatagatatttttataaagccactcaaatatgatgtttttgtcaagatgagaaatatgctatgagttataaagaaatcaattttaagaggggatgttgaaagtaaactagattttagtttttttgcaaaatagaagaatcggtcgatcggttcagaaacaattaaccaataaagacgacataatacattttcttatttgcctagaacctgaggtttataaataaaattttaatctaaggaataattaatatatgtaaagagaaaatctaaggaataataaaattgtttttttattgaatcctcttcttgttttttagttttacttattattttgctgttaataaactcctgccacacttattattattttttttttccaatataataattcatttcgtagtaaccttggcaaaacctccatggcaatggtggcaattcacacatcagagttcttaaaacgagagaacaatccattagcaagagtgagcttgggcatgtggcgggggttggattaattgcattatcgcatcagtgcaagtcattaatagcacaaattaatgctccggcaacaaatcaactaaccacatactccttcacctgctaatattt

SEQ ID NO: 16 - DNA, 2134 bp, Setaria italica
tttggaccatgtttagttcctccaaaactcccaactttagcactatgcaaaaagaagattctccatcacatcaaacttgcggtacatgcatggagtactaaatgtagacgaaatcaaaaactaattgcacagttttgttgtactttgcgagacgaatcttttgagcctaattagtcaatatttggacaataatttacaaatacaaacgaaacgctagtgtgctacagtgctacaacagtaattttgcacctccaaactttggccaaccaaacaagatcctatatatcggagttcgttctacgacgacttgcactacatgccccgtttaaatgctcagctagtcagctaccaaaatgggctcataaagtcataatagcagcggactccttccaccgacaaactcccaccctcctctagtcacccgcagcatgccaacatgaatttcagctgaaacagagctgcaccaccacccaagcacgcaaacaaatttgagcaagtaaaattaattgcaccgcaagaacagtaaatgcaagtactgttagtatattcggccaatgagaaatgaacgcaggagagatgtttttcgtacatgtgctttcttgaaggacccctcgcatcaccactcatcaatggaactgcgtgttcaaaaatggcggccacagagcagcagccgctagcttccgtctgtccgggcccccgaactctctgtaaagctccggcagatccacaagagatcacatggcagcccgatctccccggggccaatctcctcttgagcaagaccagctgctggcctctcgcgtccttgtgcttcctccttgattggaaggcagcctggtgttaaaggtgagagcacagtaaatttggtttggtactccttccgttccaaattgtaggtcattttaattttttagtttataaatattattatgcacctagacacatgtttctgtagttgtcttcctgtaaggaaaaggaccttgcaaattgaacccatgtactgatggtcatttctgaacttcgcacatgaggtcagtacggtcagtccatgtcgtagtaattccgaaggaaactgcacatgaatgactcatgtatgatgtatattagtaaaatgctgccatgatgtgaaccagcaatacgatagcatgtgcgacgatgttgtacaaaacagaggaggcccttgtaaaagacagacggcattacattcaggggctaaaaacatggtaccatacaggtgagatatgatggatgaatgcgggcagcagcccactgcgactacagtatacgcactaaaacctcggcagatgcaatcagaataatacacagaaacgcagaggactatcagactatgcaccagtattctgacagagtataagcacacttttgaatatgcagcagtaaaagatgcagtgaaatcagttttaaagaagttaccagattttccagtaaagatatgagacttgtgatgaaatctggccaaatcctgtgcctttcagttggatcacaaaataccttcagccgctccatagttattcagaacaaactcgagttagatccctcgaccctctgtttcgctggaccagccaaacccatgtttccattaataagttcgatagattcggtatttcaattcagggatcagatcgccgaatccagctcgaggtatagttaggtacactgagtaggtgggaggcaccgattccgattaaatctgcagtctgggaatagaaaagatcctcattttctgtcaaaagatgcctgcccaaaatccacgaagctctaagctatcacagttcacagccttagtgcccttttcctttttttttgcacaatatttgtagaaaagaatttgggctaaaatactcagtaccttcattatgctagttgagagcaagcagatcactgccgtgacaagctggacaaaccaagatcattaaatgttggccaactactaacagtgtgatgaacatgtacacatctttgcacgcaatagcttcaatggaactgtggagcactgctcgaatgtatatatatgtgcctgaagggaactcagttcatcaactcaagcatctctaggttctcaaccagttcttaggccacatattcagtcttgtctgtagacgttgagagcaag

SEQ ID NO: 17 - DNA, 2056 bp, Setaria italica
tttggaccatgtttagttcctccaaaactcccaactttagcactatgcaaaaagaagattctccatcacatcaaacttgcggtacatgcatggagtactaaatgtagacgaaatcaaaaactaattgcacagttttgttgtactttgcgagacgaatcttttgagcctaattagtcaatatttggacaataatttacaaatacaaacgaaacgctagtgtgctacagtgctacaacagtaattttgcacctccaaactttggccaaccaaacaagatcctatatatcggagttcgttctacgacgacttgcactacatgccccgtttaaatgctcagctagtcagctaccaaaatgggctcataaagtcataatagcagcggactccttccaccgacaaactcccaccctcctctagtcacccgcagcatgccaacatgaatttcagctgaaacagagctgcaccaccacccaagcacgcaaacaaatttgagcaagtaaaattaattgcaccgcaagaacagtaaatgcaagtactgttagtatattcggccaatgagaaatgaacgcaggagagatgtttttcgtacatgtgctttcttgaaggacccctcgcatcaccactcatcaatggaactgcgtgttcaaaaatggcggccacagagcagcagccgctagcttccgtctgtccgggcccccgaactctctgtaaagctccggcagatccacaagagatcacatggcagcccgatctccccggggccaatctcctcttgagcaagaccagctgctggcctctcgcgtccttgtgcttcctccttgattggaaggcagcctggtgttaaaggtgagagcacagtaaatttggtttggtactccttccgttccaaattgtaggtcattttaattttttagtttataaatattattatgcacctagacacatgtttctgtagttgtcttcctgtaaggaaaaggaccttgcaaattgaacccatgtactgatggtcatttctgaacttcgcacatgaggtcagtacggtcagtccatgtcgtagtaattccgaaggaaactgcacatgaatgactcatgtatgatgtatattagtaaaatgctgccatgatgtgaaccagcaatacgatagcatgtgcgacgatgttgtacaaaacagaggaggcccttgtaaaagacagacggcattacattcaggggctaaaaacatggtaccatacaggtgagatatgatggatgaatgcgggcagcagcccactgcgactacagtatacgcactaaaacctcggcagatgcaatcagaataatacacagaaacgcagaggactatcagactatgcaccagtattctgacagagtataagcacacttttgaatatgcagcagtaaaagatgcagtgaaatcagttttaaagaagttaccagattttccagtaaagatatgagacttgtgatgaaatctggccaaatcctgtgcctttcagttggatcacaaaataccttcagccgctccatagttattcagaacaaactcgagttagatccctcgaccctctgtttcgctggaccagccaaacccatgtttccattaataagttcgatagattcggtatttcaattcagggatcagatcgccgaatccagctcgaggtatagttaggtacactgagtaggtgggaggcaccgattccgattaaatctgcagtctgggaatagaaaagatcctcattttctgtcaaaagatgcctgcccaaaatccacgaagctctaagctatcacagttcacagccttagtgcccttttcctttttttttgcacaatatttgtagaaaagaatttgggctaaaatactcagtaccttcattatgctagttgagagcaagcagatcactgccgtgacaagctggacaaaccaagatcattaaatgttggccaactactaacagtgtgatgaacatgtacacatctttgcacgcaatagcttcaatggaactgtggagcactgctcgaatgtatatatatgtgcctgaagggaactcagttc

SEQ ID NO: 18 - DNA, 3000 bp, Arabidopsis thaliana
ttctgtaataaatacgtattagaaaatgatgaagatattagatattctctcgaaatcaagtcgagggccattaaaattgatgattattagaaaaaaggttataaatacttagttggaagacctagctagctaataactaagaaaattaatagaagaaactctctcttattgatatgtcgtcgtccatgcttctatattggatatagttctcgcatatgagtaaatctactatcattaatacaaaaacaataatatcaaacgcttaattagcatttgaacaataaaaatcatttatgtattcatgcataatttagacacacacacacacgcacacgcacgaatatatacatgttgtagtacactagcacttaggtctaaattttgagaactacgcaatatgacaagtaactaaatctttgttaacctaactaatgcgttgttgttgacatagatgaggtacgaaatggttgtaatatgaattcttatacacattagtatatgtggaagccaagtagccaacgaaacacttgcatgtaaatttttttgattattctttacaagcttaaacgttttttatttaacctatagaggtaaaagaaaaacagtgattttggttttgacttatataaaccgaaactctttctatcactctatagagataaatatacaaagaaatgagtaagtttctctcactatagcattaatggagctttagatcatcataaatgcattgcaccctctctatgcgctcatcaataactccttttaaatttcttattgcaactccacctgttcttttccttcctctcttgtcctcttctccttcttcttcttcaacaacaaacttccattgttcttaatacctagctagctcttccccggtttgagattatcccaaaataacaccggttctcgggtaaccggtcggtttttccggagcaaccaacccttttacttctctttatcattgtctcagatcttctgttcttcaaaggcaaaaatgggcataaaccaaagatcattgtgaattagggtttcactgtgtctccaaaagtaagatctctattatcaaaaaagatctttctctctctacacatatatgtatgcatatgcatttgtgtgtatgtatcttaggttatgtttatagatcggatccatattgcatgttgttgagactcttagatcttctatttttttgtttatggtgttttttggttctcaagatctcgatgcctatgatttgtttttttttctagattattttagtttaatttaatttaatgttttttgtgtctttttgcggagacttatgatctaagataaataaagcgttaccaaaaactttcttggagttagcagtttcaaaaggggtttgacgaaatctacttggtggttgtgtcacaaaaaaaagaccattgacttattgtcaacgctttaattaaccctatatactatatactatttttaatcgcttttaattaatcaaccctatatatcctgtattaaactaattaaacttagcctttttcattagttttgttactggaaacggttcgtctttagtgcacaaagaccaaggtcaatttaattctttaataaattcaattgagagatcagaagcttgtgaatctggttctctctctctcttctcttactagcttttgagtcgacaaaagagagagaaaagatcattaaactcgaatccaaaacttcaaccaacaaaagggaaaaaaagaaaaaataactacaaagagatctatctttagggtttcaaaactttcttgagtttcagatcgaattgagtaagtatttatattatttaagtgttcttcttactgtatcatttctgaccatacaccaaactagggtttcttaaagatcataactctctctctctcgcttcttcctacactagatctgtccgatagatctgatgctttgagaagtcttgtgactttcaagattgatttttctttttgtttgtttgtttatatgtacacatacttggagatagatatactctcatatatgttactgtgcatatggatggatccatcttaagtgtgaataaaaactacccaaatctcatttttgtttgtttcttatctcatttgttgtttttgtaaggccgtcattataaatctaaaacaatttatccgttttcgtaaagaaaatcgctttccaaaaaaaaaaactttgaagtaaaaatatcattttgggtctatattcaaatctctcctcatatttccatctcattatttgtaaaattaatatattaggtcattatcatattgattatagagtttatatgttatgttataaagtaaaagttatatatgtaaatattacgtttgtaatatatatatttatacatatgtacgtatacataatttgtatgtatatgtgcctcatttttaacaaatattatcgttaatctttagtttcattataattttttagggatgtatacattatataaatattttatgttatttatatctgaaatttctatactataacatcttagatagttttcatacgtaattaagagttttaattaatagttacataattatgattagatgaatttatctataaattgtatgcaaaaatatatacatatccaaccgaaaaaatggagagtaaacaaaaacctaacaattaatggtttagtacttgtgaaaatgataaaattattaatttaatatatagtttcataacagctagaaataactttcccttaatataattattttcttccatttccataatgattttcttcttcttcattctgtatacatatatgagcgtttcatatataatcttttactaattcgattgtgattttgattttgggcagtggaagatatacttggagaagaaaatcaaatcacgaaaatatattgatcagtgccttgaaggaaaccaaagttgacaactccaaaaatccatttcgttattaatatctaactgagtgatcatagtcaatcatccataaca

SEQ ID NO: 19 - DNA, 6237 bp, Glycine max
taatattattatcagtggagtcacgtaggaaaatgaaagtagaaaaagtgtttgcggagaagaagaacataatgttgtgaaaaattaggattaataatttttttatttaattttttaataactaatgattttgattaatttataattaacttaataactcaattaattataagtatttattaataatctatcagaatgatcaaaatcactaatttataagatttgaggatcaaatgttataattaaaattcaggagacaacaatcataaatttgagaaactagatgactaaaaattacaattaaaatttaggaattaaaatcatggatttgaaaaattaggatgaccaaaattataatttaaccttcttttataagaagaaatttaaaagtctccttgcattaaatatttttttgaaaacattattaattatgaaccatttttctgaaattaggatgaccaataggtagaatattaatatttttttccttttcatatgtagagaatttacagaaatcttattgtgtactatctttacatctataaacaataaaaggtagagcaataaacatatttacagattaattaaacgacataaagacaacaaatatactaaacaaaaagaataaggacatgtttcattactattataggtaattttgaaaataatatataaatttagaataaatatataattattaatttaattaattatttttttaatctttatgaattagttgattgaattttataaaaagatcaaaagggagcggttaatttgtagatgacttgttattcatgagaaactaaagaaaaataagaattaatgatataaatattaatcattcaattcatcttgtatttactaaatcaatcaacaaattaatttaaatcagaaatctgatgttaattaaaatgacattattttctaaaatattgttaaatccttttactattaatgaattatataagaatcaaatttaaataaatataattattgtttagtgactaattttatcttataaaatgagtttaatatttatacactcatagtatacaagagttttacattatcatccaatcatgaattccgtttgaattactttaaaataattatttgaaaagtcaataaatttaatatatatgatgagtttaattaaatgaatatataaaactttttgcataatatcaatatataataattttctcttataaaaatagtatgtaagataattttctctcattatgattatatactaatacatttgttaaaaaaattataataacgatatactgtatcaaaattaaactcttataaaattgttacgaaataattaaatgttaaaatagagtctttctattgtaaatatatttaaatcaatatttaacaccaataaacaataaacattttgtttataaatattttaattatggctaatgttaaccctttttattgtgatccacaaaattatattgtcatgatttttttacgctctcgtattcttttttttttttgacttaattatttttttaacccctgaatttaagtcgtgtattttttttagtctttaaaattttttaaaaaaattctctgaattttgacaaatgatttttttttgacataataaattgatattttatgtcaatttttagtactttgtgaaatttttttagtatttcgtaatagtttcaaaatgaaaatttaaaataaactaatattatgatttaatttacagaatcaatccatttttttgtcaaactcatttcaacatcttgtaaaataagtataataattaatctttactatcaaaactagttttaagcccggcttaactaattattattttagtttctaaattttggatttgtgatttttttagtccttaaaattttaaatttatttctttgtttctgaattttgataaattattctttttagtcagagccatgtaaattgatattttgtgataatttttaactacttaaatttttaataaaaaaaccatcacaaagtgttaaaaaccaccatataatacagtgttagtttataagtaagagattaaaaaataaatttgtcaaaatttaaggattaaaaaaatatttttaaattttagagattaaaaaaatacactccaaattcaagaactaaagcaataattaagttttaattttttaaccaataacctaataacactcaccaattagcaagaccgtgaatacttgttaactttttaatttgaaaggcaagagtagaaggcagtgtaaggggctagggttgagaaatataagagtcacttcactggacctagctcacaaaataaaagttaaagcatggaacgatatcgcgctctaactctcttctattcatgtataaccatttaattaaatttacaccagtcatccctccataaatgcttctacaccctctgcaataacttcatgctgccaaaccctctcccacttgttctacttattcattttatctcttcctgcgtcgtttggttctatctctatttcgctttggcccacactaaactcacaacttccccatcaacaactccttcacttccctaattccccacacacattcttgtttctctgatgacccacaacacatccgtttcagtcaacaacataactaattaaggttcattccactctcaaacgcttaaggccccctcttgcatctacgcattcttaattttagctttgacttgctttgcttagcttagttaatttccgagtgagagaaaggggtaacggctacgttcccccgcattgaaattggttacttgacaagcgttatagtaatcatctgttttgtcaaacctttcacactgactcaacactctacccttattttgtcttttctgatttccctagcattgcaagttttgcgtgtaagataagagtagtaaggccaaggccagggaaagtcagcagtgtcctcttgcaaccttaacataagaatgaatctccagacaaacacttgaaagtgctcgaaatcgatcgatcagagacaaaacagcgacacgaggggcctggatgcttttattatcaatttttgctttgcgtggcggttccataaatcccaattgcaagtcccatcaaactttagagatggaaagcggttgattcattatattgcagtcgtcttcgtggttaatctatcaggtgatcacttccttaatttcttattttctctcataattaaacagaggtacaacaaattttcttttttgagtaaaacagcaagttgattaaatggaaaaactttaacattttattcattctcgatggggagaaaagtcattctggcttagaatttttttacatatatacagttgctattgttatcacatatgttcatcttaatgttttattgccaacaaagtttggtattttagcaatctacaagtatttctgaaaatgtttttttaggtgtgtcatggctttggttgaagctcaccttatttaaatttttttttttgaaaataatctacgtttcatctcgactaaaaataatcacacattaaaatatataagtgagagagacaattcttattccttaagttaatttttaggattaagttagacttctcacattctaagatcttattaatgtgagagacaactctcattctctcacttactttattgtaagaattttattctttctttatttttatgataagaaagtgttaatttttaatgtttattttagagagaaaaaaagtttctattgtgaggcccaggagaaaaataaattccttacctccccaaattggcatgaaatgggtgaggggaaaaatgatctcttactaatttttattttagttttcttaatatatatatctttaaaaatagttaaatataaaacaattttatttttaaagataagtatatttttctattagaatgaaaaatataactttttataaggtgtttggctatttggtgtttccataagcatcgagaataacttaaactctttatcctttttctaaatatgcaaattaaatcaaactcaaggatcatcctataccttttttagttagcatgttattggtataaaatatctacttgttttaccaataatcaattttcatccacaaatcttaaatctaagactttatttatttaaaggaattgagtcaaatataacttcgaccaacatcttggaaatatttatttatttatctaagtaattacaagaaaaaaattctctgcgtttttgttatttccatttatcaaaataacgcatctttgctactctattaatttttttttctttttttctttcttattttttctgtattttatttctaaatcaaatagaacattaatatgtttctatctaatcttttgttacccataataatcataaacttaaaaaaatttctgtgtaaactaaacttgtagttttaaaacaaaaaataaattccatttgtctactcaattaataaataattctaaattatttaatattctctcagtgtttatattttaacatctttaaatatcaaacactctattaacactcttaatttatctctatcattcttttagtatctcattgtctatcatatcgatgtttctctctcttttatttccatctctcaagatatcaattaaatttgggtgtttgaagactttttaccatattaattttcctactttctttttattttttcatcttgctcaatcattcgacttaactgacttgactactttctttttatatggtgagtatttaatgtgttttatattttaaaaacattaaatattttatatttatttttcatttaatacttttttcgtatggtaataatattcttttcatttaatactttttttgtacggtaacacttttttcaatttcaaccaatacaccttcacgtaaaaatattaaaaaaacaattaatttgataaataatttagaaaaagatattagttaaaaaatacatgtaatacttttaatcaataccgattatattttgtctttatactaattaatcaataccgattatatttcctctttaagtctttcactataaattgaattcgagtaatgttgtatgagaaatgcaaggaagacattttttaacaaactcttgatgatttccttaaaaaaaatacttcttttataattgattgaaatttataggaaatcataattttttggaatgctaggaacattctctttggcacactcctttaaagattctttgtatatacgattgactaaagtttattgaacaattttgataggttttaatttttatttaatataaatcaggagagagtatgaaaaataaaatgtaataaaaatgatgattttcattaaattctaaggaaatattaaaaaaaaaagcgttaaagaaagtgatgttaacatttatggtattcactaccaagcacattaattagtaatctttttaatttgagttgtgatagttgttttatccttgtaaaaaaaattctccaataaaaagtattagtatttattttttatataagattcaatttataattttttattttgattatttttaaattaaattgcctctaaataagttattatattggaaaaattaattgagatgagagaatttattatatgtcagaaatacaaatgtatttaatatttacttctacaaaaaataatttaaatacttaattgaatatgttttttaggtacatccttaattgaatatgtttaaaaatttctaagaaatttgagggtaatagttaataagatgcatagttttctttttattattactgatagttattaagtaaaaatatctatatttttcatatttttagatgctaaaagtattggattcttaatatttattattttaatacaatttaaaaatttatagaaagttaatattagaaaaatataattaatttaaaattaagaatagcattgctcatttactattttactaaaaatataaaatattatctgtcaagaaaatattaaatattaactatttaccttaggtagttatgaacattcaatgtattaaacttctaacgtatattatattgattattgaagttgttcaaaaaatattcttaagggcactcgctatagggctacacaaactagcctacttcttgctttcccacatttttgcttccgtcgggcgagttaaatgttttagaattcctggtttggcagagactagctagagaagaaaattgcggcttccgaattatttaagga

SEQ ID NO: 20 - DNA, 6192 bp, Glycine max
taatattattatcagtggagtcacgtaggaaaatgaaagtagaaaaagtgtttgcggagaagaagaacataatgttgtgaaaaattaggattaataatttttttatttaattttttaataactaatgattttgattaatttataattaacttaataactcaattaattataagtatttattaataatctatcagaatgatcaaaatcactaatttataagatttgaggatcaaatgttataattaaaattcaggagacaacaatcataaatttgagaaactagatgactaaaaattacaattaaaatttaggaattaaaatcatggatttgaaaaattaggatgaccaaaattataatttaaccttcttttataagaagaaatttaaaagtctccttgcattaaatatttttttgaaaacattattaattatgaaccatttttctgaaattaggatgaccaataggtagaatattaatatttttttccttttcatatgtagagaatttacagaaatcttattgtgtactatctttacatctataaacaataaaaggtagagcaataaacatatttacagattaattaaacgacataaagacaacaaatatactaaacaaaaagaataaggacatgtttcattactattataggtaattttgaaaataatatataaatttagaataaatatataattattaatttaattaattatttttttaatctttatgaattagttgattgaattttataaaaagatcaaaagggagcggttaatttgtagatgacttgttattcatgagaaactaaagaaaaataagaattaatgatataaatattaatcattcaattcatcttgtatttactaaatcaatcaacaaattaatttaaatcagaaatctgatgttaattaaaatgacattattttctaaaatattgttaaatccttttactattaatgaattatataagaatcaaatttaaataaatataattattgtttagtgactaattttatcttataaaatgagtttaatatttatacactcatagtatacaagagttttacattatcatccaatcatgaattccgtttgaattactttaaaataattatttgaaaagtcaataaatttaatatatatgatgagtttaattaaatgaatatataaaactttttgcataatatcaatatataataattttctcttataaaaatagtatgtaagataattttctctcattatgattatatactaatacatttgttaaaaaaattataataacgatatactgtatcaaaattaaactcttataaaattgttacgaaataattaaatgttaaaatagagtctttctattgtaaatatatttaaatcaatatttaacaccaataaacaataaacattttgtttataaatattttaattatggctaatgttaaccctttttattgtgatccacaaaattatattgtcatgatttttttacgctctcgtattcttttttttttttgacttaattatttttttaacccctgaatttaagtcgtgtattttttttagtctttaaaattttttaaaaaaattctctgaattttgacaaatgatttttttttgacataataaattgatattttatgtcaatttttagtactttgtgaaatttttttagtatttcgtaatagtttcaaaatgaaaatttaaaataaactaatattatgatttaatttacagaatcaatccatttttttgtcaaactcatttcaacatcttgtaaaataagtataataattaatctttactatcaaaactagttttaagcccggcttaactaattattattttagtttctaaattttggatttgtgatttttttagtccttaaaattttaaatttatttctttgtttctgaattttgataaattattctttttagtcagagccatgtaaattgatattttgtgataatttttaactacttaaatttttaataaaaaaaccatcacaaagtgttaaaaaccaccatataatacagtgttagtttataagtaagagattaaaaaataaatttgtcaaaatttaaggattaaaaaaatatttttaaattttagagattaaaaaaatacactccaaattcaagaactaaagcaataattaagttttaattttttaaccaataacctaataacactcaccaattagcaagaccgtgaatacttgttaactttttaatttgaaaggcaagagtagaaggcagtgtaaggggctagggttgagaaatataagagtcacttcactggacctagctcacaaaataaaagttaaagcatggaacgatatcgcgctctaactctcttctattcatgtataaccatttaattaaatttacaccagtcatccctccataaatgcttctacaccctctgcaataacttcatgctgccaaaccctctcccacttgttctacttattcattttatctcttcctgcgtcgtttggttctatctctatttcgctttggcccacactaaactcacaacttccccatcaacaactccttcacttccctaattccccacacacattcttgtttctctgatgacccacaacacatccgtttcagtcaacaacataactaattaaggttcattccactctcaaacgcttaaggccccctcttgcatctacgcattcttaattttagctttgacttgctttgcttagcttagttaatttccgagtgagagaaaggggtaacggctacgttcccccgcattgaaattggttacttgacaagcgttatagtaatcatctgttttgtcaaacctttcacactgactcaacactctacccttattttgtcttttctgatttccctagcattgcaagttttgcgtgtaagataagagtagtaaggccaaggccagggaaagtcagcagtgtcctcttgcaaccttaacataagaatgaatctccagacaaacacttgaaagtgctcgaaatcgatcgatcagagacaaaacagcgacacgaggggcctggatgcttttattatcaatttttgctttgcgtggcggttccataaatcccaattgcaagtcccatcaaactttagagatggaaagcggttgattcattatattgcagtcgtcttcgtggttaatctatcaggtgatcacttccttaatttcttattttctctcataattaaacagaggtacaacaaattttcttttttgagtaaaacagcaagttgattaaatggaaaaactttaacattttattcattctcgatggggagaaaagtcattctggcttagaatttttttacatatatacagttgctattgttatcacatatgttcatcttaatgttttattgccaacaaagtttggtattttagcaatctacaagtatttctgaaaatgtttttttaggtgtgtcatggctttggttgaagctcaccttatttaaatttttttttttgaaaataatctacgtttcatctcgactaaaaataatcacacattaaaatatataagtgagagagacaattcttattccttaagttaatttttaggattaagttagacttctcacattctaagatcttattaatgtgagagacaactctcattctctcacttactttattgtaagaattttattctttctttatttttatgataagaaagtgttaatttttaatgtttattttagagagaaaaaaagtttctattgtgaggcccaggagaaaaataaattccttacctccccaaattggcatgaaatgggtgaggggaaaaatgatctcttactaatttttattttagttttcttaatatatatatctttaaaaatagttaaatataaaacaattttatttttaaagataagtatatttttctattagaatgaaaaatataactttttataaggtgtttggctatttggtgtttccataagcatcgagaataacttaaactctttatcctttttctaaatatgcaaattaaatcaaactcaaggatcatcctataccttttttagttagcatgttattggtataaaatatctacttgttttaccaataatcaattttcatccacaaatcttaaatctaagactttatttatttaaaggaattgagtcaaatataacttcgaccaacatcttggaaatatttatttatttatctaagtaattacaagaaaaaaattctctgcgtttttgttatttccatttatcaaaataacgcatctttgctactctattaatttttttttctttttttctttcttattttttctgtattttatttctaaatcaaatagaacattaatatgtttctatctaatcttttgttacccataataatcataaacttaaaaaaatttctgtgtaaactaaacttgtagttttaaaacaaaaaataaattccatttgtctactcaattaataaataattctaaattatttaatattctctcagtgtttatattttaacatctttaaatatcaaacactctattaacactcttaatttatctctatcattcttttagtatctcattgtctatcatatcgatgtttctctctcttttatttccatctctcaagatatcaattaaatttgggtgtttgaagactttttaccatattaattttcctactttctttttattttttcatcttgctcaatcattcgacttaactgacttgactactttctttttatatggtgagtatttaatgtgttttatattttaaaaacattaaatattttatatttatttttcatttaatacttttttcgtatggtaataatattcttttcatttaatactttttttgtacggtaacacttttttcaatttcaaccaatacaccttcacgtaaaaatattaaaaaaacaattaatttgataaataatttagaaaaagatattagttaaaaaatacatgtaatacttttaatcaataccgattatattttgtctttatactaattaatcaataccgattatatttcctctttaagtctttcactataaattgaattcgagtaatgttgtatgagaaatgcaaggaagacattttttaacaaactcttgatgatttccttaaaaaaaatacttcttttataattgattgaaatttataggaaatcataattttttggaatgctaggaacattctctttggcacactcctttaaagattctttgtatatacgattgactaaagtttattgaacaattttgataggttttaatttttatttaatataaatcaggagagagtatgaaaaataaaatgtaataaaaatgatgattttcattaaattctaaggaaatattaaaaaaaaaagcgttaaagaaagtgatgttaacatttatggtattcactaccaagcacattaattagtaatctttttaatttgagttgtgatagttgttttatccttgtaaaaaaaattctccaataaaaagtattagtatttattttttatataagattcaatttataattttttattttgattatttttaaattaaattgcctctaaataagttattatattggaaaaattaattgagatgagagaatttattatatgtcagaaatacaaatgtatttaatatttacttctacaaaaaataatttaaatacttaattgaatatgttttttaggtacatccttaattgaatatgtttaaaaatttctaagaaatttgagggtaatagttaataagatgcatagttttctttttattattactgatagttattaagtaaaaatatctatatttttcatatttttagatgctaaaagtattggattcttaatatttattattttaatacaatttaaaaatttatagaaagttaatattagaaaaatataattaatttaaaattaagaatagcattgctcatttactattttactaaaaatataaaatattatctgtcaagaaaatattaaatattaactatttaccttaggtagttatgaacattcaatgtattaaacttctaacgtatattatattgattattgaagttgttcaaaaaatattcttaagggcactcgctatagggctacacaaactagcctacttcttgctttcccacatttttgcttccgtcgggcgagttaaatgttttagaattcctggtttggcag

SEQ ID NO: 21 - DNA, 1999 bp, Zea mays
tcggcctgtccattattgtaggaatagctagccgcccatgcaagttctattcagcctgccttttcatcgctctgaccaccatgtcctcatctgcgtgagatgtgctatcaatagttggacacaattcgtcctcaagctacgacggggacagtttgacattaccagagagagagagagagagagagagagatagagtgctagcaataggaggggatgcaaaaacatgtaccacctcaccgttctgtcgtacttccctctgatcaacttcacaacgttcaaatttaggcaaggcgctgtggctgaagtttacaatattctgcaccacctcactgtcttttgtagttccttctgatcagctttaagttgttccaattcaggcaaggcgctgtgggttaagttgacaattgttacctcagcttgatcaacagatgacactttttttttttggtgaagaagtgttggcttccgggtcacaagagtatcctctcctctgtactgtttctgaaacttgttgccttcctgtccattgtggcgattaggccggggttaaaaattcccagtttcgataacgattgctcgttgctgggttagactttgcacagaaatcttccgctcgaggagggggtttagttattaattacccacagtgatgagagtgacgtacgctgtactagaatttttgcgaatgactgacagtaatgacatcatcgtccctgacaataatatccaacatccaacgcccccacacttatattccagtccaggcatattgtatatgaacgagcgagcacgcacggtacgtacgtgtgcggtgtgtccgccggcgcctaccaggacgtagtacaacatcgccatctgagcccatgacgcccgcccagcgccagcgccagcggcacggcaaaagtcgccggcgccagcaagaacagcaggaagcacaggtttcaaagggggcgccgcgagccagggcccaggaccagcagcacgtacagagcgggagtaataaacgctgaaaagctccgcgccctctcgcgcaatcaatggcgacgcgacgcgaactctaccggccggctccgtccgccccagtcggggtccccacgcccccagggggagggtgcctctctcgctcactcacccgtcgccctgcgtgccgaattaatggcggcgaccgctgcgtgcaactgatccgacccgacccgaccagaccccccgcgccgacgaccgcctagctctgcactcaccgggaatcagagaccgaggcgccgcgagtagcagaggcaaccacccgttctttggagtcggagcgtcccggcccggtcgggatccattttctgcacgtcgtcaccactcaccacgcgcattggaaccgccggaagccgcgcgtgtgaaaaagctgctgcttcatggtcatggtcatggcggtcacacagcagcttaatttgttacgctaagtcgctaacagttgagacactggcacaagcagcatggccggcctccggctctcatgagactacttgcctcctgtgccagtgccagccagtatagaaattgagacgacgacgtcgacggcaacaacagccgtcaccaccacgccgcgtctcaatcccgttgggtttcaggcgccataactccagcagtcccgctgcgagtgagggggagccggtggcacggctgggctgcaacgatccgtgtccccccgcgtcctcctccttcctactgtgcggtgccggtgccgctgcccccaattgctcgcgttgcttgcgtcccttggcgaccaagttacatgtataaagccatgcatgaccagagaagaacacacaactgtcctggcctgtccacggtccacacacgccttccttatatcggcgctcacggttctataaaaaaaacacagtacgagcagagcaaggcggccgtgagctgagctgagggaaggacgacgtacggctcagttgctagcccggccgccggagctctccgagatctgggccgccagcaacac

SEQ ID NO: 22 - DNA, 3000 bp, Arabidopsis thaliana
attttaagaaattaaatctttttttttggtatctgtgtgttactttttataaatgtattttgaaaagtattatttcaatttatagataaatataattatgactctcaagtggatttttttttcacggtcaattggagtttggctgtgaatcttgtgaataatatcaactaattaagagtcggccgatactccgtatctttgatcactttcacccatatcttgaaatttaccaaatgttttctttcattggggtttctataccttttttttttggttctttctgtaatttgggttttaaagaaaaaacctataattacaaaaaaggttaaaagttaaaactaagcacgttcaaatatgttctttcgagatcccaccttcctgtctatcttataagaagtcgaacacgtgtgctcgttgtgtgaattagagtggttatttcaacatatataattaaactatgtatgtatcataaatacactgaatatgttggagttgggtcttgtggtaggctaacttgttcgcttcactttggtttagtttagccttgtaatcggtggtttcatatactgaaatttttaattttctaatataatccagatgacaaaaaaaaatcataaatacactgcaatggccatttttaaaaaaactttaaacgaaatatatatacatcaccaagtatcaagtaagtaatttggttgttttgatttttcaaaaaaacatttaggtgattcttttaacaaccaatcatatatgtagcaaagattaattatgtcaatcttttaacgtcacttatatagtttagctgtagtattattgtaagccaattgtacggacttcgtaaccgtttcgacaaagatacaaactaatcaatgtttaagatggcataatattccgacttcccctgccactcggtagtactgctgcgccatcctacaagaagcactcgtaaatgagtggttagacggccaaaaattagcaggattcaatccttgattaagagatggttcagataagccctctaggcctctactcgtcacaattcatatattaattgatcacactgcatgaaatgataagatcaagtcaattacctcaaaattaattgaaagataaaatgataaagcaacaagtaatgatcatatatggatgtaacaaccttcttcatccatacgaatatgataattcttttgtcgatcatttgccacatctatttaactaagtattttgtacattaagatcattttgcgagtattcccgcgttcccaacaaaaacgaattgaaaaactacatagggtgaattttgctctcgtggcattaaagagagaggctgacattatagattatgatatatttattatttttcttagtagatttcttgaccagcctttagatatgcttgctctgtcatggcataaagccttaaaccctaaagccctttacatttgtacagtaccaacaattgtacccaatgttaaatgaatgcggattaatttgtgatatgagaccatcaaaataaaatacttataagatagtagatatatagaaccgtaacaaaaagatgagaagaaaaagacaaattgaatagaaactggaccaaaagataaaagagtatatgaagaagcaagccaccaagaagtgtaaccatcgttgcttcaactgtaaaccgcacattaaatgtgtgtgagagaaagagagatagactccagctgtgagagctacgtccattgcatcaattgggttatatgtcgttaacaattttttaaaaatacataaataaatcaataaaatatttagaaaaaatcaatattataatgatattttgaagaagttaggtccataatggaaatatagagacttagtgtctatttatcaagaaatagtgtctatttatcaagaaataatgtctatttggtccacaattatcatattttttgtggccactcaaactacgaaaataatgaatattgttaatttttgtcttatttaagtctataactaacttactaattcggttgaaattgctaatatgcattttccttggtccactattacagtgctactgctgtcttattcttgaacacaaaataaaaaagatttcaaacacaaaatatgcatttttttgttccaccattacaaacctttatttggagaagtatacagttggatattaaatattttaattaaaaaattgaaaatattgaagttctttttctccagtattttggctggagcaaaactaaataaattccaaattaaaagctcgaacggaaaacatttactatgcaccaaaataaatgttgatatgaaatttgcatcagcatatacagtatgtatgtagtacaattgaacagagtcaaaattaattgtcactgaaacagtcagattttatttctgttaaaaaatattttcagacaaaaaatgattttttaacgtttttttatataattttattaaacctcaaaacattcctcagcagattgttttataatgttattattattttttcttaaataattttatttgaatttcgttatagagagataaataaaagatttttggggtctagttggctctcatagtttgaatgcttatataaggaaacagagctcgaggctctcaataatgccacataaaacacaacaccaaagcctttataactctttctggggtttttaattctctcaacgaacaaaaaaaaaaactcaactaatattctccatcctctttcttcagatttaagagaaaccttatcgttatattctctcttctcttttctttttgactcccacaagaagaaagcaaatttctttttctcaggattgcttgaaaactgtagaaatctttaaggtttttttacaccaataagagtcagagagagagagagagagagaaagagagatctattcataaaaaagacaggtaatctcaactccgaggagataactgatataacaatttgagagaataagaagaagaagaagaagaagaccaagctaaaga

SEQ ID NO: 23 - DNA, 2620 bp, Arabidopsis thaliana
attttaagaaattaaatctttttttttggtatctgtgtgttactttttataaatgtattttgaaaagtattatttcaatttatagataaatataattatgactctcaagtggatttttttttcacggtcaattggagtttggctgtgaatcttgtgaataatatcaactaattaagagtcggccgatactccgtatctttgatcactttcacccatatcttgaaatttaccaaatgttttctttcattggggtttctataccttttttttttggttctttctgtaatttgggttttaaagaaaaaacctataattacaaaaaaggttaaaagttaaaactaagcacgttcaaatatgttctttcgagatcccaccttcctgtctatcttataagaagtcgaacacgtgtgctcgttgtgtgaattagagtggttatttcaacatatataattaaactatgtatgtatcataaatacactgaatatgttggagttgggtcttgtggtaggctaacttgttcgcttcactttggtttagtttagccttgtaatcggtggtttcatatactgaaatttttaattttctaatataatccagatgacaaaaaaaaatcataaatacactgcaatggccatttttaaaaaaactttaaacgaaatatatatacatcaccaagtatcaagtaagtaatttggttgttttgatttttcaaaaaaacatttaggtgattcttttaacaaccaatcatatatgtagcaaagattaattatgtcaatcttttaacgtcacttatatagtttagctgtagtattattgtaagccaattgtacggacttcgtaaccgtttcgacaaagatacaaactaatcaatgtttaagatggcataatattccgacttcccctgccactcggtagtactgctgcgccatcctacaagaagcactcgtaaatgagtggttagacggccaaaaattagcaggattcaatccttgattaagagatggttcagataagccctctaggcctctactcgtcacaattcatatattaattgatcacactgcatgaaatgataagatcaagtcaattacctcaaaattaattgaaagataaaatgataaagcaacaagtaatgatcatatatggatgtaacaaccttcttcatccatacgaatatgataattcttttgtcgatcatttgccacatctatttaactaagtattttgtacattaagatcattttgcgagtattcccgcgttcccaacaaaaacgaattgaaaaactacatagggtgaattttgctctcgtggcattaaagagagaggctgacattatagattatgatatatttattatttttcttagtagatttcttgaccagcctttagatatgcttgctctgtcatggcataaagccttaaaccctaaagccctttacatttgtacagtaccaacaattgtacccaatgttaaatgaatgcggattaatttgtgatatgagaccatcaaaataaaatacttataagatagtagatatatagaaccgtaacaaaaagatgagaagaaaaagacaaattgaatagaaactggaccaaaagataaaagagtatatgaagaagcaagccaccaagaagtgtaaccatcgttgcttcaactgtaaaccgcacattaaatgtgtgtgagagaaagagagatagactccagctgtgagagctacgtccattgcatcaattgggttatatgtcgttaacaattttttaaaaatacataaataaatcaataaaatatttagaaaaaatcaatattataatgatattttgaagaagttaggtccataatggaaatatagagacttagtgtctatttatcaagaaatagtgtctatttatcaagaaataatgtctatttggtccacaattatcatattttttgtggccactcaaactacgaaaataatgaatattgttaatttttgtcttatttaagtctataactaacttactaattcggttgaaattgctaatatgcattttccttggtccactattacagtgctactgctgtcttattcttgaacacaaaataaaaaagatttcaaacacaaaatatgcatttttttgttccaccattacaaacctttatttggagaagtatacagttggatattaaatattttaattaaaaaattgaaaatattgaagttctttttctccagtattttggctggagcaaaactaaataaattccaaattaaaagctcgaacggaaaacatttactatgcaccaaaataaatgttgatatgaaatttgcatcagcatatacagtatgtatgtagtacaattgaacagagtcaaaattaattgtcactgaaacagtcagattttatttctgttaaaaaatattttcagacaaaaaatgattttttaacgtttttttatataattttattaaacctcaaaacattcctcagcagattgttttataatgttattattattttttcttaaataattttatttgaatttcgttatagagagataaataaaagatttttggggtctagttggctctcatagtttgaatgcttatataaggaaacagagctcgaggctctcaa

SEQ ID NO: 24 - DNA, 2792 bp, Glycine max
ttaaaaaaaatctcaaaagaataaattttcgactaccagtaattggattttaaataggaagagattaaaaaaccacctcttaatcttatattccatcttccattccataagattgtgggtgtcattaaaacttattatcaatacaaaatgaaaaataaagagtcacggtttgttgaggagaagaatgcacttagttccaaatcccaatacatgtattaagtagtttcgttaacttttttttattaaattttaattatgttcaattaattatcaatttctataattaatttattattttaccccgaatttgagggggaaaaagttaaacttataagatactttccatgttttttaaaaattgcattcaatatttttcttttttttttcaccctaaaaaaatattttaattagttaactcacattacactcagatccccttaacagaaggtccatgttgatcacattatttttaataaaaaattatgtctaaaataccctcaaataaattacacttgcacttccatgtgtttttttaaaattacatctaatattcctccttttttgtacactataaaaaatctcttaattatttagctcccattacattcactaagacttcttccctctcctaaacacagtttaataatttaatagaaagtagacacaatttgatcatatgacttttaatgaaaatttatatctaaaatattcttatcttcttcctcttaacttcataaaaaacataacattattttgaacctgaaaatattttaatacttttttttctctaattgaacctgaactcaccttgttggtacgtatgtgttaatatctttccttttttttttttacttcaattttttttgtgtgttgagttgtttggttgcaacatttttgttggacatgttcccaacaatgccaattgattgaatatgatcatttgcttcaaattttaatgttttgttcatgcatttgtgttttaactcctttctttgaaatatttatttttgatgactagttgcttgatataatgtctcaatcaagagtttatatcttcttcgagtaatagcaacaacgaagtaaaaataaaatattaaaggaaaattgttattgtcttaagaaaaattcattaacagagtcaattgttaatttgttattgagtatttaacaaagatgttaggacaatttcatctgctcatatattccaattgatgttaattaacgacgttaacggaaagagataaaaataatgtaaaaaaaggaaggtatatcagatgcaatttgagaaaaacacaagaaatacgattataacaaaaatgttaaaacaattttatctgttcacatatttcaattaacgtaacaacgttaataaaaaagggataaaagtaatataaaaaagagaagtatcaagtgtaatttgaaaaataaaaaaacacaagaaatacgagtagtgtaattttttttagattaaattaaataataaagtctttgttaaattaaacataaggttactttataatgctctcataatgaaaaccggatttagaggtaactccaaacctaccttatctaacagctgagaggtactgtttcacctgccaaccatataaggcatttactactactctccagatctcttactgctggattacaacacgctacagcaacacgacgcgcggggtgtgtgttttcgtttacgtagattttaattttttaaggctctaattataattaattacagcgtaattaatatggagtactataaagtataataattataataagccatgtatataaaaaggagaagtgtatctgttaatgtgtactaatatcttacacaaaagtatctgataggagtgctcgtgaaatgaaataaaatgatgttattaccagaataacaaatatagaatttagctaacatatatagttaggttaaaatgtttttatataaatatttaatagaaaattacattctccttacattatagttagcattaacgattaagatgatataataaaatgatcaaatcttattaaatatctgtctaaaaataacttaaactaatataatcggtatataaacttaactcttaaatacaacagtgattaaaataaaatcaactttatcaattattatatttaaaaaattaaatagaaataattttatgaaaaaaattactataaaatgcattgataatattgaatactaataatttttaatagtttgtttttagaccaccaaaccagaatcaatcaagggagggttatttcagcttaactaagtttttatatattattttatttatttcataagattaaaatctcaagtgagatacatgaatcaaatagtagtacttttttttagaatatattaattgataatttaatgtcccagttagcagaagacaggtgggagactatcttactttgtaggccacaaggatcaatgcatgatccgcagcgcttataaatacgtgatgggacgaaagaatatatttttaagttgtggctcaaaagcaattactactaagaaaggataaaggaaggaaggaacacttttctgatattctttttggtattgggttgctgacctttgctagtgttatagattttttgggttctcttgtgttttaataaatacaggaaaaaaaaagtatataggtgcctagaagaaaagacaatatagggtgtggagcaattacgtttgatcacaagggaaaaggtgcaacggtttgcaagatagcatagaagattttgaagaatcttaattgcaacatagtagtgcagttgca

SEQ ID NO: 25 - DNA, 2500 bp, Glycine max
ttaaaaaaaatctcaaaagaataaattttcgactaccagtaattggattttaaataggaagagattaaaaaaccacctcttaatcttatattccatcttccattccataagattgtgggtgtcattaaaacttattatcaatacaaaatgaaaaataaagagtcacggtttgttgaggagaagaatgcacttagttccaaatcccaatacatgtattaagtagtttcgttaacttttttttattaaattttaattatgttcaattaattatcaatttctataattaatttattattttaccccgaatttgagggggaaaaagttaaacttataagatactttccatgttttttaaaaattgcattcaatatttttcttttttttttcaccctaaaaaaatattttaattagttaactcacattacactcagatccccttaacagaaggtccatgttgatcacattatttttaataaaaaattatgtctaaaataccctcaaataaattacacttgcacttccatgtgtttttttaaaattacatctaatattcctccttttttgtacactataaaaaatctcttaattatttagctcccattacattcactaagacttcttccctctcctaaacacagtttaataatttaatagaaagtagacacaatttgatcatatgacttttaatgaaaatttatatctaaaatattcttatcttcttcctcttaacttcataaaaaacataacattattttgaacctgaaaatattttaatacttttttttctctaattgaacctgaactcaccttgttggtacgtatgtgttaatatctttccttttttttttttacttcaattttttttgtgtgttgagttgtttggttgcaacatttttgttggacatgttcccaacaatgccaattgattgaatatgatcatttgcttcaaattttaatgttttgttcatgcatttgtgttttaactcctttctttgaaatatttatttttgatgactagttgcttgatataatgtctcaatcaagagtttatatcttcttcgagtaatagcaacaacgaagtaaaaataaaatattaaaggaaaattgttattgtcttaagaaaaattcattaacagagtcaattgttaatttgttattgagtatttaacaaagatgttaggacaatttcatctgctcatatattccaattgatgttaattaacgacgttaacggaaagagataaaaataatgtaaaaaaaggaaggtatatcagatgcaatttgagaaaaacacaagaaatacgattataacaaaaatgttaaaacaattttatctgttcacatatttcaattaacgtaacaacgttaataaaaaagggataaaagtaatataaaaaagagaagtatcaagtgtaatttgaaaaataaaaaaacacaagaaatacgagtagtgtaattttttttagattaaattaaataataaagtctttgttaaattaaacataaggttactttataatgctctcataatgaaaaccggatttagaggtaactccaaacctaccttatctaacagctgagaggtactgtttcacctgccaaccatataaggcatttactactactctccagatctcttactgctggattacaacacgctacagcaacacgacgcgcggggtgtgtgttttcgtttacgtagattttaattttttaaggctctaattataattaattacagcgtaattaatatggagtactataaagtataataattataataagccatgtatataaaaaggagaagtgtatctgttaatgtgtactaatatcttacacaaaagtatctgataggagtgctcgtgaaatgaaataaaatgatgttattaccagaataacaaatatagaatttagctaacatatatagttaggttaaaatgtttttatataaatatttaatagaaaattacattctccttacattatagttagcattaacgattaagatgatataataaaatgatcaaatcttattaaatatctgtctaaaaataacttaaactaatataatcggtatataaacttaactcttaaatacaacagtgattaaaataaaatcaactttatcaattattatatttaaaaaattaaatagaaataattttatgaaaaaaattactataaaatgcattgataatattgaatactaataatttttaatagtttgtttttagaccaccaaaccagaatcaatcaagggagggttatttcagcttaactaagtttttatatattattttatttatttcataagattaaaatctcaagtgagatacatgaatcaaatagtagtacttttttttagaatatattaattgataatttaatgtcccagttagcagaagacaggtgggagactatcttactttgtaggccacaaggatcaatgcatgatccgcagcgcttataaatacgtgatgggacgaaagaatatattttt

SEQ ID NO: 26 - DNA, 2691 bp, Oryza sativa
tgccggttcggcggaagaaacaccgaccaaattttattaagattgaaagaagttacatgcatccgacattagaccgtcgagttaaggcgagaagacctaagaagcaaaacaaaagaaaaactgagagaagaatgtaaagggcaagtgcacttagggctactcctcactaaaccttcttttgtggattgatgcatcaaaaaactatatgtactaggttacatcgtgttttttttttcgttttcgtctcattctctgcttcggcctgccgtctgcttataccgttaattcgatgatgactccagacttcattcatgaatatatttctactatagatatacaaccctcgctcctctatgtttatcttcatcttcatcttcaggagattcaaacaccacctcttaaagatgaagatgaagatgaagataaaaattaagtgtttcacgtaaaacgatgtattaataacatgtgattaatagagttttaattgttataaacttgaaaaatgaattagtatgatattttagagcaactttcatatataaagttttcgcacgagacgtaccgtttagcagtttgaaaagcatgtcacgagtatccaaaatttaatcttgtgcttgcagaagaaacgaagagggcctaacccatataacctgcgtcattaatctatagcttagcaaagtttacttttttgcctgcctcctggcacaggaacgccgacgaagaaaaacctacaggctttctcaactatgattccttcctcaacctgtgaactctggcgacaggaggacgacaggggtgtatgtggagcagataatgcacagtaataatccaatccttaggacttacaaactgctggaatgaactgaccaagtacgtttagaacgtaggaattttgacttatacatgcatagtgtgatttgtacgtgaaatacattaattaattttctgaatttgtttccaatttctcgtcgtcaggcaatgccgcaatgccttgtcttaaagattgcaaattgaatgcgccatctccatcgatctctctatctccattgatggctgcccaaaaaataaaaaataaaaagagccgacaatgtttaaggagagaagcatacgcgcacgtttcgtgatgaaacatacatgcaagactaatttcgaattatatatcacatattcgctctctgaatgagcgtatcgggtatttggaatttcgtttgatatgtaaaagttgaattttaggttacttttttgtggaataatatatcataaattaatattttttataactatttatgtgacatgtaaatgacgagctgatatcagtttaggataatttcctcgctaggtgattgaacgaaccctgcacgcggcagacgtcgtggctactactatctagctagctagcgttggttacgcgtggctactatccagccagaattggttacgccgtcgcccatcgatccgccacaccacgccaaacgcgaacttaattgctactatccgatagtatgtacgcgtactacacaaaagtggggaaaagaaggttgtcctgactccatgagaagacgatccaaaacacggggccggacaaccaaacaagctagctagcggccggcggcgagccaccgtcgtcgttgctgaagacgtcgactaatttggcctcccggccggcgccatcgatcatctcaaaattaatactccctctgtataagggattttgagtttttgtttgcactgtttgatcactcgttttattaaaaaaatttgtgacaatataaaaaacgagaagttgtgcttaaaatacttcggataataaagtaagtaaaaaataaataataattctaaaaaaaatttaataaaataagtgtgcaaacaatacaagcaaaaactcaaaatcacttataatcatgggacggagggagtatatagtatccaaaaatcatctcaaaattaaaaccgaatcgaaactcgccgggccgcggcccgcccggccgtcctggcccaattaattccggcgaccgctgcatgcaacgctccgtacgtgatcgcccagcggctcgcgcgcgcaccacgcgtccacgcgtctctctcctttatacatggacaatggattaatttacttgtagaaaaaaaaacacgaggctagcttagcttgtgcccggcccagccgcgtgcgtgatttccccaagttcacaacctgtacgtgtgtgtggtacgtagcggtcgcaatcccgtttcaaatctcgatcgtgtgtggtgccattaactccgtctggttggggaagccggtggcggatagcccgactgacaggtgctgtggcctggcggccggccggccaatcgatggatggacggatggatcccatcgatgatccttcgttgattcgcgtcaacctctcgctgcccgaatcggactctcaccttccccgccctccaccgctgtgaccgcgcgctgtctgtcccttggctaataccagtcgcagtgcaactgtgcaagtgtttcacgtatataaaagcatcccgagacgcagcgcgcatgaccagccgcgttgggtgcaaaaccacaaccgccaacatcttctaactcccctcacggctctccctctccccgcacgcacaacaccggtgaacccctacgtactactgagctgagctgagaggacgaagaagaagatcaagctcgaggggcttgcgatc

SEQ ID NO: 27 - DNA, 2500 bp, Oryza sativa
tgccggttcggcggaagaaacaccgaccaaattttattaagattgaaagaagttacatgcatccgacattagaccgtcgagttaaggcgagaagacctaagaagcaaaacaaaagaaaaactgagagaagaatgtaaagggcaagtgcacttagggctactcctcactaaaccttcttttgtggattgatgcatcaaaaaactatatgtactaggttacatcgtgttttttttttcgttttcgtctcattctctgcttcggcctgccgtctgcttataccgttaattcgatgatgactccagacttcattcatgaatatatttctactatagatatacaaccctcgctcctctatgtttatcttcatcttcatcttcaggagattcaaacaccacctcttaaagatgaagatgaagatgaagataaaaattaagtgtttcacgtaaaacgatgtattaataacatgtgattaatagagttttaattgttataaacttgaaaaatgaattagtatgatattttagagcaactttcatatataaagttttcgcacgagacgtaccgtttagcagtttgaaaagcatgtcacgagtatccaaaatttaatcttgtgcttgcagaagaaacgaagagggcctaacccatataacctgcgtcattaatctatagcttagcaaagtttacttttttgcctgcctcctggcacaggaacgccgacgaagaaaaacctacaggctttctcaactatgattccttcctcaacctgtgaactctggcgacaggaggacgacaggggtgtatgtggagcagataatgcacagtaataatccaatccttaggacttacaaactgctggaatgaactgaccaagtacgtttagaacgtaggaattttgacttatacatgcatagtgtgatttgtacgtgaaatacattaattaattttctgaatttgtttccaatttctcgtcgtcaggcaatgccgcaatgccttgtcttaaagattgcaaattgaatgcgccatctccatcgatctctctatctccattgatggctgcccaaaaaataaaaaataaaaagagccgacaatgtttaaggagagaagcatacgcgcacgtttcgtgatgaaacatacatgcaagactaatttcgaattatatatcacatattcgctctctgaatgagcgtatcgggtatttggaatttcgtttgatatgtaaaagttgaattttaggttacttttttgtggaataatatatcataaattaatattttttataactatttatgtgacatgtaaatgacgagctgatatcagtttaggataatttcctcgctaggtgattgaacgaaccctgcacgcggcagacgtcgtggctactactatctagctagctagcgttggttacgcgtggctactatccagccagaattggttacgccgtcgcccatcgatccgccacaccacgccaaacgcgaacttaattgctactatccgatagtatgtacgcgtactacacaaaagtggggaaaagaaggttgtcctgactccatgagaagacgatccaaaacacggggccggacaaccaaacaagctagctagcggccggcggcgagccaccgtcgtcgttgctgaagacgtcgactaatttggcctcccggccggcgccatcgatcatctcaaaattaatactccctctgtataagggattttgagtttttgtttgcactgtttgatcactcgttttattaaaaaaatttgtgacaatataaaaaacgagaagttgtgcttaaaatacttcggataataaagtaagtaaaaaataaataataattctaaaaaaaatttaataaaataagtgtgcaaacaatacaagcaaaaactcaaaatcacttataatcatgggacggagggagtatatagtatccaaaaatcatctcaaaattaaaaccgaatcgaaactcgccgggccgcggcccgcccggccgtcctggcccaattaattccggcgaccgctgcatgcaacgctccgtacgtgatcgcccagcggctcgcgcgcgcaccacgcgtccacgcgtctctctcctttatacatggacaatggattaatttacttgtagaaaaaaaaacacgaggctagcttagcttgtgcccggcccagccgcgtgcgtgatttccccaagttcacaacctgtacgtgtgtgtggtacgtagcggtcgcaatcccgtttcaaatctcgatcgtgtgtggtgccattaactccgtctggttggggaagccggtggcggatagcccgactgacaggtgctgtggcctggcggccggccggccaatcgatggatggacggatggatcccatcgatgatccttcgttgattcgcgtcaacctctcgctgcccgaatcggactctcaccttccccgccctccaccgctgtgaccgcgcgctgtctgtcccttggctaataccagtcgcagtgcaactgtgcaagtgtttcacg

SEQ ID NO: 28 - DNA, 2946 bp, Populus trichocarpa
tactgtgaaaaaataacttgtccagtttttatttcatctgcatttttcaataccaacaaaatcatcgtgaaaatatttgatctaaaaaatcattttttaccatctatttcctattagaaattccaacaccatttatttttatgatagaaaattttatttatttatttgataaaaaataatgaaagaaaatgacgaggaacttaataaaaaaatataataaaacaagaaaaaggataagatttttttaaaagaatgacaactaagattggataaaaaaataaaataaaatactgagggacaaaattgaaagaaaaaacaaattaagaaaaggataaaaaagagcaattccaaaaataaggactaaatctggaaaaaaagaaatgaaataaaatatcgagggacaaaattgaaagaaaaacaaaccaagaaaattataaaaaaaaacaacaatcaagagaatgagtaccatgtttgatataataacaaaacaaaatcaatgaaaatggatgaaaatgaagaaaaaatccaaaacaaagaaagagcaattaaaagaaagaggatcataattgaatttttttcaccattattttttttatcaaaataatataaattttactttttagttgaataaaaaatcaagttattagttaggggaaaatcatgttaacacccattgatttttatttttgccattatttttttttatcaaaataatgtcattttacttcctgcaaaataaaaaactcgattgaccctggtaaccctgatcactcgacccaacccatgactcgggagatgatgggggtcgactcctaagccgggttttaaaagcatgataaaaaaataagcactaaatatgaaatgaaaatccaataaaattaaacaatgactgatgaaattgcgaaaaaaaattaatcaataagagaactaaaaataacaggaattacaatcataagaataatgaacgaattcaacaaaaaaaagaattaaaatcaaatgataatggattaaattgaaaaataaattccaattagaaaaaaaaagattaaaagcaaaataaataggaataaaaaaatgaggatcaaatttgacaaaaaacataaaaaaatcaaatgttaagggatgaaattaaaaaataaataaatcagattcgatacaattagaaaattgagaaccattttgcaactttacaaggttaacacatcttttgatatagaggagagagaaaagaggggtggagaaaattttttgcttgaactccgctgcgccacgaatgatgacatgtgttggcccaccgtgtggagggcgacatgacacttcggatgccgttgttaaagaccactaacaaccactgggaggagcctcacgcgccactcaaaaggcgcgagcgccttccacttgctggcgagtgctctgcgcgccccaactacttttttttttgaattacagaaagatcataacattcatgaccccacatgataatttaaaaaaaatctaaaaacaccccttgaccttaaacaagaaaaagttaattccaagggttattacagagagcaaaacactcctaatcccatgtgataattgcaaaaataaacctaggtttgagaaaccaaagataccctttacccttagaaaatatttttgaccccaagagctatttggtaattagactatgaaaaaatatgaaaattaagaaatgaccattgaacataaaacctttttttttccttctaaaatcatgggcgtaattatactaagcaacaaaatgtaaaaatactattccactcttatatgtattttatattttgatatctttgaaggacaaattaatcgttttattatgaattgcactgtggacaatccacaataaaatactgataccttttagttatatgttaaacattgaagaaatgttttttcatatttttcacgatttttttatttttatatcttttagttttccaaatttaatagtaaaaattaaattgggtaaaattattagtctaaatatgatgtaaacataaacattaaaatgataaaatatttaaagagatatttatataaaaaaattaatttattgccatccctatcttttatcttctttaaccttccttgctagaaagaataaaaaaaaatagttaaaaaatattcttaaaatcaagacaaaaattaattattatttccatctccaccataaaatatatttcttattggtttatttgatattataatagcggttgtttttttataaatatattaattattttttaaaatttatttttaacattaacacatcaaaataattttaaaaaattaaaaaattaattttaaataaaaaaaccctataatagaacgtaaaaaaaacaaacacgtattttgaattaattaccaatttggcacaaaccgtgagctgaattcttcaactgcccaaccaaagagtcattaatttctaggagcatgaggccaccactccagctgtgtgccaaatgacaagggaggagaggaaatgagacaaaaacatggaagtgtgagctgctaaataaagattgattaagaacttcaactgtatttttggtccttccttcaagctatatatatgtgggtgcctccataaagatatcgcagttacgagtaatagatatacagtgttagtcgagtctttaaaggaaaaaatcaaagagagagagactgaacttgatactctcttcctttcatctctctctccccctcttaccctctaagggttgctccatctggagcttgcgttcatgttttttcgcttcatttgtggtgtagctaaccactttgagccataaccagggaactatctttttacccaacaagataaagctgcttacaggagcaaaattgagacatatactccagtaaaaactcaagaaaaaattgaagaaaaccgttgaagatcaggtgctttactgcaaaaaa

SEQ ID NO: 29 - DNA, 2500 bp, Populus trichocarpa
tactgtgaaaaaataacttgtccagtttttatttcatctgcatttttcaataccaacaaaatcatcgtgaaaatatttgatctaaaaaatcattttttaccatctatttcctattagaaattccaacaccatttatttttatgatagaaaattttatttatttatttgataaaaaataatgaaagaaaatgacgaggaacttaataaaaaaatataataaaacaagaaaaaggataagatttttttaaaagaatgacaactaagattggataaaaaaataaaataaaatactgagggacaaaattgaaagaaaaaacaaattaagaaaaggataaaaaagagcaattccaaaaataaggactaaatctggaaaaaaagaaatgaaataaaatatcgagggacaaaattgaaagaaaaacaaaccaagaaaattataaaaaaaaacaacaatcaagagaatgagtaccatgtttgatataataacaaaacaaaatcaatgaaaatggatgaaaatgaagaaaaaatccaaaacaaagaaagagcaattaaaagaaagaggatcataattgaatttttttcaccattattttttttatcaaaataatataaattttactttttagttgaataaaaaatcaagttattagttaggggaaaatcatgttaacacccattgatttttatttttgccattatttttttttatcaaaataatgtcattttacttcctgcaaaataaaaaactcgattgaccctggtaaccctgatcactcgacccaacccatgactcgggagatgatgggggtcgactcctaagccgggttttaaaagcatgataaaaaaataagcactaaatatgaaatgaaaatccaataaaattaaacaatgactgatgaaattgcgaaaaaaaattaatcaataagagaactaaaaataacaggaattacaatcataagaataatgaacgaattcaacaaaaaaaagaattaaaatcaaatgataatggattaaattgaaaaataaattccaattagaaaaaaaaagattaaaagcaaaataaataggaataaaaaaatgaggatcaaatttgacaaaaaacataaaaaaatcaaatgttaagggatgaaattaaaaaataaataaatcagattcgatacaattagaaaattgagaaccattttgcaactttacaaggttaacacatcttttgatatagaggagagagaaaagaggggtggagaaaattttttgcttgaactccgctgcgccacgaatgatgacatgtgttggcccaccgtgtggagggcgacatgacacttcggatgccgttgttaaagaccactaacaaccactgggaggagcctcacgcgccactcaaaaggcgcgagcgccttccacttgctggcgagtgctctgcgcgccccaactacttttttttttgaattacagaaagatcataacattcatgaccccacatgataatttaaaaaaaatctaaaaacaccccttgaccttaaacaagaaaaagttaattccaagggttattacagagagcaaaacactcctaatcccatgtgataattgcaaaaataaacctaggtttgagaaaccaaagataccctttacccttagaaaatatttttgaccccaagagctatttggtaattagactatgaaaaaatatgaaaattaagaaatgaccattgaacataaaacctttttttttccttctaaaatcatgggcgtaattatactaagcaacaaaatgtaaaaatactattccactcttatatgtattttatattttgatatctttgaaggacaaattaatcgttttattatgaattgcactgtggacaatccacaataaaatactgataccttttagttatatgttaaacattgaagaaatgttttttcatatttttcacgatttttttatttttatatcttttagttttccaaatttaatagtaaaaattaaattgggtaaaattattagtctaaatatgatgtaaacataaacattaaaatgataaaatatttaaagagatatttatataaaaaaattaatttattgccatccctatcttttatcttctttaaccttccttgctagaaagaataaaaaaaaatagttaaaaaatattcttaaaatcaagacaaaaattaattattatttccatctccaccataaaatatatttcttattggtttatttgatattataatagcggttgtttttttataaatatattaattattttttaaaatttatttttaacattaacacatcaaaataattttaaaaaattaaaaaattaattttaaataaaaaaaccctataatagaacgtaaaaaaaacaaacacgtattttgaattaattaccaatttggcacaaaccgtgagctgaattcttcaactgcccaaccaaagagtcattaatttctaggagcatgaggccaccactccagctgtgtgccaaatgacaagggagga

SEQ ID NO: 30 - DNA, 2817 bp, Vitus vinifera
tatattatgtaagtttgaaaaaaaggataatatttgataaggtatttaaaaattatttacttcaaaaatgcattcaacaataataatttttaaccatttatctttcatgttcaatttattggagaaaaattattggtaaatcattcaacttggtcccattaataaataggtactaataaataggtgagagaatggtgaaaaaaccaaagagagaataagaaaggtagagtgaccagagttttttcatttaatagtcagaggtattttaggaattttttgaagacaatatctttcatttcaatttctactctttcattgggttttaagtttaattataaattatatgaggaccttatctcaattattcaacccaactgggatagaaacagaattctccctatttagattagggaaaattgatttaaggttttttttttttaaatagagttaacaataaaatacaaactaacaaactttcaagagaaagaaaaaaaaaacacttataatattacaaaaaaaaaaaaaaaaaaacacatcctaatcacatagcaaaactcaatattttttctctctcttcttttgtcctattaacaaccaaacatgattcaattaattgaattaaactattaaactaataaaaagagccgatccaacttggttgttagttgttccgtattgcatttgcttttacggatgaggaaattgaattaaaattgtaattagcataacagacgaagaactgaatatagtcagggagtagaggaaaagtttagattatatttatgacattaaaaatcaacctaatccaacttggttgttagttgttccgtactgcagttgatttttatgcataagaaatattggacggtccaatataatataatattagttgatatatagctttcagttaggttggaaggtggacaattgcaagtgccaagtcaaggttagtggcaagggcggctccatcattcacaatttgcctgccattacctcccttttgcttggagttttcccatcaagcaatacatttattgttgtttatagtgttaaagggattatgcaaatatcatttcatataagctgaaggaaatttcatgaaaaaaaaaatagcatttattatttatactatgaaggcaaccatagaaattaatatcatttcataaagttaaacaaatttaaggcaaaaaggaatttgttgcctatcacattaaagaaaatgatagaattaagggaagaaaatttagtctatgtttagtttttgaaaaatttgaaaaaaaaatggaaagaaagaaaataaaaataaaaaataaattatttttatatgttttcttaaatttcataaacttatttttcttcattgtattaagattaaataattttaaaatatataaatttttaattaattttaattatattttattttcttttatatttttcatgatgaaatcaaacatgaaaaaataattttttttaatatttttttttctttccttattatttttcaagaaccttaaaaatgtaaaagttttaagttttaagttgatttctttttcttttttttagtcttttttatttttaggaaatataaataattttaaaaatctgtaaggatttttttttcatttgataatataatcatatttttataaataatgaacatatactttgagactttgaattaatgtaaatttaaataattatcctcctaaataatatttataaaaattgaatgtagttctcaagaaaagaaagaattaaaataaattgttcaatttttactttttttatttacttaaaatccaactattttccaaaattttgagggagtgagtacatagaatgattcatttttcttctactcataattcattttggagattcaaatgaatgaaaattagatagtatagtctattttcaaattcacaagttgaagaaaaaaaagtgatgatgagtagaaagatgtatcgtcaagttcatcatttaataggcacaccgccacaaatcctcattcatcttgaagaatgaacttagagatgagattttggaagtgtacagtgtgatacgtatgagtggtgtgtattggtacattaagatggataaagatggaaataaaatggagagaaagaaagagagagaggaggaaaaatagaacatgctgctgaatagtatagggtaaccggccccatgacttagcaatacgcaattactgaaaagctccaaccctcctcccaaccatgagccattaatgtcttaagagaatcaggccatcactacagctgtgccatcctccctagcaaatgcccctacgcgttctcaatttggaggacactttttggtcaatttcggtgacgttcatactttgcctagagacaaaatattgatcaatattacaagctaaccgatagagactgattaagagctttaactgtatttggatgcccacttagtttttggagctataagtaggtgcattggagttgggaaaaataaaggccagagtttgggagacttgcaaccaagtttcacaaatacaggggcttaatcaagttgtttcattatccaattattttattataaggcaattccaacctcttaacctctcgatctctttccttctttctgctgcttctatctgggaattgtttccttccctttcctctctttctttttcttgtatttggcttcttctactattttgggctacaatatctcggatctttctgttcccgaactgaaacttttcctcatcaaaagcctgtacagatagagaagagtttgcacatatattaagaaaggaataattttgtcggaaaa

SEQ ID NO: 31 - DNA, 2500 bp, Vitus vinifera
tatattatgtaagtttgaaaaaaaggataatatttgataaggtatttaaaaattatttacttcaaaaatgcattcaacaataataatttttaaccatttatctttcatgttcaatttattggagaaaaattattggtaaatcattcaacttggtcccattaataaataggtactaataaataggtgagagaatggtgaaaaaaccaaagagagaataagaaaggtagagtgaccagagttttttcatttaatagtcagaggtattttaggaattttttgaagacaatatctttcatttcaatttctactctttcattgggttttaagtttaattataaattatatgaggaccttatctcaattattcaacccaactgggatagaaacagaattctccctatttagattagggaaaattgatttaaggttttttttttttaaatagagttaacaataaaatacaaactaacaaactttcaagagaaagaaaaaaaaaacacttataatattacaaaaaaaaaaaaaaaaaaacacatcctaatcacatagcaaaactcaatattttttctctctcttcttttgtcctattaacaaccaaacatgattcaattaattgaattaaactattaaactaataaaaagagccgatccaacttggttgttagttgttccgtattgcatttgcttttacggatgaggaaattgaattaaaattgtaattagcataacagacgaagaactgaatatagtcagggagtagaggaaaagtttagattatatttatgacattaaaaatcaacctaatccaacttggttgttagttgttccgtactgcagttgatttttatgcataagaaatattggacggtccaatataatataatattagttgatatatagctttcagttaggttggaaggtggacaattgcaagtgccaagtcaaggttagtggcaagggcggctccatcattcacaatttgcctgccattacctcccttttgcttggagttttcccatcaagcaatacatttattgttgtttatagtgttaaagggattatgcaaatatcatttcatataagctgaaggaaatttcatgaaaaaaaaaatagcatttattatttatactatgaaggcaaccatagaaattaatatcatttcataaagttaaacaaatttaaggcaaaaaggaatttgttgcctatcacattaaagaaaatgatagaattaagggaagaaaatttagtctatgtttagtttttgaaaaatttgaaaaaaaaatggaaagaaagaaaataaaaataaaaaataaattatttttatatgttttcttaaatttcataaacttatttttcttcattgtattaagattaaataattttaaaatatataaatttttaattaattttaattatattttattttcttttatatttttcatgatgaaatcaaacatgaaaaaataattttttttaatatttttttttctttccttattatttttcaagaaccttaaaaatgtaaaagttttaagttttaagttgatttctttttcttttttttagtcttttttatttttaggaaatataaataattttaaaaatctgtaaggatttttttttcatttgataatataatcatatttttataaataatgaacatatactttgagactttgaattaatgtaaatttaaataattatcctcctaaataatatttataaaaattgaatgtagttctcaagaaaagaaagaattaaaataaattgttcaatttttactttttttatttacttaaaatccaactattttccaaaattttgagggagtgagtacatagaatgattcatttttcttctactcataattcattttggagattcaaatgaatgaaaattagatagtatagtctattttcaaattcacaagttgaagaaaaaaaagtgatgatgagtagaaagatgtatcgtcaagttcatcatttaataggcacaccgccacaaatcctcattcatcttgaagaatgaacttagagatgagattttggaagtgtacagtgtgatacgtatgagtggtgtgtattggtacattaagatggataaagatggaaataaaatggagagaaagaaagagagagaggaggaaaaatagaacatgctgctgaatagtatagggtaaccggccccatgacttagcaatacgcaattactgaaaagctccaaccctcctcccaaccatgagccattaatgtcttaagagaatcaggccatcactacagctgtgccatcctccctagcaaatgcccctacgcgttctcaatttggaggacactttttggtcaatttcggtgacgttcatactttgcctagagacaaaatattgatcaatattacaagctaaccgatagagactgattaagagctttaactgtatttggatgcccacttagtttttggagctataagtaggtgcattggagttgggaaaaataaaggccag

SEQ ID NO: 32 - DNA, 456 bp, Zea mays; identical to SEQ ID NO: 6

SEQ ID NO: 33 - DNA, 2980 bp, Setaria italica
gaacgacggaaactgctagcgtaactatagaattctggaaaggataggcacgtcgtttttcagtccactccgtacagcgacagaaacagacgtctctcaaaaaatcagtacaggtgtaatgacatttacagccacgaaggatcgttttctttgctatacatactcaggtttttctctacttatactaatctttcgctaatttatctctgaccagtaaaaggctgtgtttcctattgtgcgcagaaagatcagaccacacgccaagagccgtgccgaggtatatatggaaacagtacactactatctgcagcagtgcagcatcgatttcttcgccccttctcctgaaaagtcgagatataaaaagatggagaaaacctcggtcaaatttggattagttgcatgcatgcatgcatttcatcgcgaggattacctccgttttaaaatgcttgacatgattttcaaaaccacatttaacaatttgtcttattaaaaatcaatatattatgtaaaaatataaattatatttaaaatatatttaataataaaacaagtcacaattaaataaactatactccttacataggtttataggtttctgaaatctgaacaagacgattatcatgtgcagagtccaaacgtcaacggtgtaaaacaaacacttgaaacccgaagtaaatataccttcatccaacaacattgacaatactactacttcctccgtttcaaattgtaggtcattttagcttttctaatattattatgcatccagacatacactatatctagtgcatagaacaactatacgcctagaaaagtcaaaacgacctataaaggtataaaggagtggtagttgcttatccaagatgattagcgaattgcatcttagaagtggataagatgcttaaatttgcaccgtactttggtacacatggtagctttcctcatgggaattaacttcaaaccgctcttatgacccttcaagtacttgtgtttaagcacacaccttgcattttagatgccataatatacatttttttgtcctttttaaggcattcattttttttagttttgacttgttttgttattgtattactatcacaagccgatgatgcatcatgcatgtaattacctgacctatttcactcaggctatttctagtggagagtttcatctcacagtttccaagaatgacatgtcatcaaaagaggtttgatttctagtggagagtttcacctcacagtttccaagaatgacatgccatcaaaagaggtttgagttgatgaatgaaacaataccccccaatgcagagttttatttcacacccataccatttaattgtgaggcctgtgattggatatgctaagatgaaatgaaactctatagccccaaatgcaagtttcaacaggtttcgtagtcttgaaaacagtgcatacacagtttcatcttgagagcaagtttaataacgcagctagcaagcgggctgcaaggtttctctcagccttttcctagcccactcgtacaatggttaactcttcaccattaatacatgatccacaagtcattctcacaaagtttcttggttcctgtgcccaagtcggctataagcttatagcccgcttctcctctctcacctcttctctctcctccacgtcagcattcagccagcttacagcctcttattatacttgctctgatgaaactcttttcctctctcacttcataattaccttgccatgttatcaatgtgtcatcgtatttaacgtatatgaaatttctatgaaacttgcactggactagcttttttgtttttgcgaaacaccgtcgacatcgagagcagtgcttagttggctgctgttcacacaggtcatcaaagaaatgaagcactgctttaaacatttgctcttatacttggctacaatggaagaggcacctaatttggacgctccatatgctatacgatgaatgtaaaagtagcagtggagaaccgagaacctcttccttctccatcactcaataactacggcggttatctagtcttaaaaatttgtcaacagtgcattattcatgaacaggacgtacgtccactgccaaacaatctcgtagccggaaattaaataaccaagaaaaaaatgaaaaatacaccggcaaattaaattatgtaagcctatctttacatggaaaatgcatgattgggcttgctgccttcgtcaattttctcctttatggctgtacacatatatagcttgaaataaatatgtatgacatgcagatatatgaacgtttattttcacattttccacgaaaaaaagtatataatgacgtccaataaatccaaaatacatgacatatttcgcatatttcgccgtattgtagcacacatattgttgacgaaaataatataaaaatcatgcacccgtctcgctctctctctcctagcaattacgatacgccctctcaataaatgcggattgcaccacctcaacactcgtccgcaataactccttcccctcttcctccacattctcttccacctccgttcccctttcttctcttcctcttcctcctcctcctcccttccccttccatggctgtctagctcctcaggatctctccgtctctccacttcctgctagctacccttctgagcttgcacgcggtaaagaatcatctcgagagctgcaacttgcaggcagacatagagagagatcagagttctatttttgcaaaggcgcacaacatatatagttcttctgctagatctcactgccagtctcacagagcgaaggtttatttgggctagtttgcccctagatctgttgctggctgtgttgttgcttggcaggcaaggtatctctatataggaataggattagcgcctgttctttggctgtagagagagagagttgtcctatgtgtctctgaagaaatggaaacgaatgagacggcaagaaattagggtttgcgaggtggtcagaggaga

SEQ ID NO: 34 - DNA, 2500 bp, Setaria italica
gaacgacggaaactgctagcgtaactatagaattctggaaaggataggcacgtcgtttttcagtccactccgtacagcgacagaaacagacgtctctcaaaaaatcagtacaggtgtaatgacatttacagccacgaaggatcgttttctttgctatacatactcaggtttttctctacttatactaatctttcgctaatttatctctgaccagtaaaaggctgtgtttcctattgtgcgcagaaagatcagaccacacgccaagagccgtgccgaggtatatatggaaacagtacactactatctgcagcagtgcagcatcgatttcttcgccccttctcctgaaaagtcgagatataaaaagatggagaaaacctcggtcaaatttggattagttgcatgcatgcatgcatttcatcgcgaggattacctccgttttaaaatgcttgacatgattttcaaaaccacatttaacaatttgtcttattaaaaatcaatatattatgtaaaaatataaattatatttaaaatatatttaataataaaacaagtcacaattaaataaactatactccttacataggtttataggtttctgaaatctgaacaagacgattatcatgtgcagagtccaaacgtcaacggtgtaaaacaaacacttgaaacccgaagtaaatataccttcatccaacaacattgacaatactactacttcctccgtttcaaattgtaggtcattttagcttttctaatattattatgcatccagacatacactatatctagtgcatagaacaactatacgcctagaaaagtcaaaacgacctataaaggtataaaggagtggtagttgcttatccaagatgattagcgaattgcatcttagaagtggataagatgcttaaatttgcaccgtactttggtacacatggtagctttcctcatgggaattaacttcaaaccgctcttatgacccttcaagtacttgtgtttaagcacacaccttgcattttagatgccataatatacatttttttgtcctttttaaggcattcattttttttagttttgacttgttttgttattgtattactatcacaagccgatgatgcatcatgcatgtaattacctgacctatttcactcaggctatttctagtggagagtttcatctcacagtttccaagaatgacatgtcatcaaaagaggtttgatttctagtggagagtttcacctcacagtttccaagaatgacatgccatcaaaagaggtttgagttgatgaatgaaacaataccccccaatgcagagttttatttcacacccataccatttaattgtgaggcctgtgattggatatgctaagatgaaatgaaactctatagccccaaatgcaagtttcaacaggtttcgtagtcttgaaaacagtgcatacacagtttcatcttgagagcaagtttaataacgcagctagcaagcgggctgcaaggtttctctcagccttttcctagcccactcgtacaatggttaactcttcaccattaatacatgatccacaagtcattctcacaaagtttcttggttcctgtgcccaagtcggctataagcttatagcccgcttctcctctctcacctcttctctctcctccacgtcagcattcagccagcttacagcctcttattatacttgctctgatgaaactcttttcctctctcacttcataattaccttgccatgttatcaatgtgtcatcgtatttaacgtatatgaaatttctatgaaacttgcactggactagcttttttgtttttgcgaaacaccgtcgacatcgagagcagtgcttagttggctgctgttcacacaggtcatcaaagaaatgaagcactgctttaaacatttgctcttatacttggctacaatggaagaggcacctaatttggacgctccatatgctatacgatgaatgtaaaagtagcagtggagaaccgagaacctcttccttctccatcactcaataactacggcggttatctagtcttaaaaatttgtcaacagtgcattattcatgaacaggacgtacgtccactgccaaacaatctcgtagccggaaattaaataaccaagaaaaaaatgaaaaatacaccggcaaattaaattatgtaagcctatctttacatggaaaatgcatgattgggcttgctgccttcgtcaattttctcctttatggctgtacacatatatagcttgaaataaatatgtatgacatgcagatatatgaacgtttattttcacattttccacgaaaaaaagtatataatgacgtccaataaatccaaaatacatgacatatttcgcatatttcgccgtattgtagcacacatattgttgacgaaaataatataaaaatcatgcacccgtctcgctctctctctcctagcaattacgatacgccctctcaataaatgcggattgcaccacctcaacactcgtccgcaataact

SEQ ID NO: 35 - DNA, 3000 bp, Vitus vinifera
tcagactgtcttgagccatcatcatcatagtttaacccatggttgtaaaggatccaatcagagtcacacgctgcacgcgcgcgcacacatttagagggattcctttttgtctagattgtaaaaattataatttttacgaattactatagaattaagacaaaatagtaaaagattcctacctggcactgtaatttttcactttacacgtggtaaattagtctgacatatacagtgcacgctcatttttaacgcatgcatgttagtccaccttcaagcagaggctagatgctatgttcgattcaaaaatcaaaacaaaaaggttgtttcacattatgtccgatttgaaaaaccaagaaagaaaagaaaatcttgtttcatgtagaaggagataaaattttaggcaaagatcaaaatttggtaagaagtaacataattgttggtttgtttatcaaatatggcaagctttacacggtaatatgcaaccaatatatgcataattacatttgtatgtagttaatagcataatagcatgcagctaatgtgtacactcttttgatatgtacatatcacactacaccatggtgcaagaatgttagagcatatatagaaatggggggtttcatgaattacaaatatttggtaagcttgttatctaaaggcaatattaggttgatatttttttcaatttggtgagggaacaaaactgccttattaacaatatccaaatttatgattgagtggaataagaaaaattaagggtgccctgaagacagccattagcccacagattttggtacaataagatacgttatcaagctaagagatttgtgcaagggaggcatgaatatagtaaatgatttattctgcatgcagaccctgctcgtggctcaggcatttaatggaatattgctagggagaaggaggagagatggggctaaaatgcttcatcacagctccacctccacctcctcctcctgataattccctttcttaattccctcacatacccacatgtaataatagatctttgtcacggggattggtgccaaaaacatcatatttggaacattaactattaatccatgttttccatacatgttactcacaaaatcttctgtttatacaataaattattggatgcatgtagcaaaatccttttaaggggtgattcattagggcaaatcgtgctttatggacatggaagttcaactcaattgaggcgtaaacagtgaaaacagtgtcacaaaacaaccatttgtaaaagcttaaaaggtactgtatatgagaagcgattaatgatatacaaacaaggagagaaacaataaaagaagtttgaaaaggagttggagaaaaggtgatgggagaatgagaaaaaaaaaaaaaggaataaaagaaaaagaaagagttgaaaggagtgctgcagttaagatgggtgtaattggcttcaccatacacgctctctcaaagacatctaaacatcaaacgcttatatgcttctgtatttctatatatatttctctctccttagcaattacacctccatccaccataaatgctattgcaccctctcaatacgctctgcaataactcctcgctgccacatcttctccacctgttaccctttcttcttccctttctcaccttctccaaagctctctgcctttcgagtctatctcctctttttcgccgtccctttattctccctctctctctctgcctcttcctctctcagtgttcttctcaaaacctgttactctcatctaaagctgccagaaaaccactctttcagcgcccaaaaagtggttttccggtgacccaatagtctctaaaacagatctgccactttgctcactggacttgaccttcatcttcaaaagggtcgttttgcttttctcccatagcttccgcacctgtaagttattttgaccccataggtcttctccatttttcaccagtctttatttatttttatttttttttgagtggggggtctaaatggggttgcaacaccatcattctcatccttaactgtcttgagacacaagattttttcacctttctttgcatattttattaacttctgagtttttgctctattttccgttatcttttttgcagtagagaaagagcaaaggttgaggttgaggttggacgcaccgagatcttcgtgggcgttatggtttgaaattggtgtttcaaagcccattccatactgtccactctatcttccatttttctccagtaagagctttgtgacctacgaacagaaatacagggtcaagatcttctttcaaagcccaaagccacagttgtagctcctccactgctgcatgtttagggtttgtgggggcagtgacacttcccggccggaataatgcttccggctaatgactggccactgccaattgaaaggaacctaaaggttgctggatttgggttgtcatcaggactaattctaagcgtggtaagccttcgtggcagtccaagttctattgatgtccatttcatggactgtgagtctgtgaagactgttagggttgtctgggtttgggtttttcttttatcattttcttagtcatttcattgtttcctcatctctcttttttctttttctttttctttttctaaatatatatacatattcaagatcaattagattagtagagggtttttgctaggcattaaggtatttcaagaaaaatcattctcgatacaaacgctaaaaagctgttttgcagatgagagagagagtcttctcataaacaggttttcaaaagtgggatagggatccataacctaagaaaattaattcactgcttaatactatgtacagatttccacacatgattaattcttttcttcttaattcaaattcttgagggtttttttttttttttttcattctttacatgggcttcttccttttgaagtggttgactcatttcattctcttggcagattgaagaaccctagctttggaatcataaaggatctgtgaat

SEQ ID NO: 36 - DNA, 3134 bp, Populus trichocarpa
aattaatcttttttttgtttgatttagttcgttaatattaattttttttctatttagttatcacactctcaggatacggatcccaggtttgacgggttaacccagttgattcagaatgtttttctttttaatttggtttgcataatttttgttagagtttttggattcatacatgtgtttggaaaacacccctcaagcctatttttagtggttttattacaaagaaaaatggatgtttggccaaacaaagcctaaaatttttttaaatataaaaaaacatcttttttcttgcatatggctaaaaactcctaaagttatttaagcatttcttttataaaaaaaatttaaaatacttttatatgttttttctaaaaaaaacatattgcataaattttacaataagtttgtaaaatttctaaggattttggcctacatttcagaaatacaaaaaaaaattattttgtttcttttaatatgtgagattatgaacttatatgtaagacttattcctgctattaaataaaaaacaattttttttatattggcactagaacgattaagtttttaacctgataagatgaagaccttcttacagagaaagacttttcttaaaccctagaatgaccaacggttagaaaacacaacattaccttagtttacgttagacaaataaacaatacagtttacctcaggtacgacgtattaggggtgttaatacctttcttttatacaatcagttctcttccccagactcagagaccagttagggtttctagtgatcaaaatattaagtgacaactttcatttcttttttttttctactgataaaagacaagtacccttcttcttcttattttttttttaatgttgtcaatttatttataaataagagacaaaaaaaagaaaaaaaatattgtccatttattaaacaaattgttatctaaatttgtgtgtgtataatcattttcatttattagataggcatttcttacaatgattttaagttcatgtagactttaatttattgtgtgttatatgtgatatatatttcacaactcatgaaaattataatgattttgtaagataacatctcctatttctgaccccagaaaactcctagatatattctcattaattacgtttttatttaaacaataataataataataataataataataataaataaactatatatatagtttatttattattattattattattattatatatataatttgattgtgtgtataatttagccatattttttcttcgttaatcatgttgttcctaactaggcatcaagaccacaaaatcatgaggaaattatgatttcatacacgaatattgatcatctacgtacataaatttttgcactggtgaagcaacaacaatggtggaaatttggaatccaagaagccgtaattcacaccaccatacttctagaggaaatttaaacatgaaataatgatcgctccttttcatctctttctcactctctcgcatttacacctctctcccaccataaatgctagcaaaccctctctatacgctctgcaattactcctctgctgccacatcctcaccacctgttccctttcttcctttctcagcttcttcaaaaccttataatttgtctcctccttttcctcttccgtttctctctctgtgtgtgcccttttttctcccatcatagtttaatcatacagtcatcttaaaacccttttcagaacatagggtctctcttcaaaaaccagccagtaaaccacttgtctagccctaaaaactggttttgtagagacccaaaacctcttccatcacaaatctaatccttgtttccatggaacttcaaaggcttctatattttggtaagttgcacaccttgtctataaaacctttcaattcatttctcttcaccataagattctctcattttcagttttatatcatgtcctaatctttttcctaaacataaaaatggtgttttttattattttttgtgcaggaattgaaaatgtcgagtgggatggattgacctagatcttagtgggcgttatagtcttggtaatggtgtgttgaaatttatttgtcaaagcttcagagaggggtccatttagtgtcaactcttcatgctcatttgtttttttatataattttaatcttttggaacgtaaaactagaaaggacttgagacttttctttgaagttatgacccaaacaccctacagtcaatcctcctctcttactacttttctttgatgttatgaccgacccaaacaccctacagtcaatcctcctctcttactacttgtaataatctttttttttggcttttgctcaaacatcttgagagaatctatttcgcaaaccaaccccacatacagccaacgtaagcagcaaaatcaatcatgtcatatcctcaagagatagaaagagagaaagataaggatgctgcttagggtttgttggtgagagtaagatatgccttctacaatggagtttaaaggagaaaaaggttgtcagatttcaatcatcctctaaggttagtcaatcaggtaaggttcctctcactttggttgaggttcttaaaaagtgtttttattcactaaatatgcttaaacaaagtaattaaaacgtttccaagcaacatccttcttggaatgaacgcataacgcttttttttttttgagtaaaaagagagagagagagagagagaagagagaggaagataaaaggtgttatcttgcttatctggtgattagccatctcttgtaactacagctacgacagtgtggaatacacttcaccttgccctacaaatttcaaacaacatttattatgttgggaatttaacttggttttgctttttttcctccttgtactcttttttataattcatcaatgtttcctatcaataaatctttccatatagatgttaatttcttatctacaaacatctcatatatagcctttaatacttttctttacttgtacacatgatttactcacccctttagcatgtttacatggcattccttaggattattcttctttttttatttgcttatttatgattttttatttgcagattggaaggacagcttagcttaaaatttaagggatttatacaa

SEQ ID NO: 37 - DNA, 3091 bp, Populus trichocarpa
aattaatcttttttttgtttgatttagttcgttaatattaattttttttctatttagttatcacactctcaggatacggatcccaggtttgacgggttaacccagttgattcagaatgtttttctttttaatttggtttgcataatttttgttagagtttttggattcatacatgtgtttggaaaacacccctcaagcctatttttagtggttttattacaaagaaaaatggatgtttggccaaacaaagcctaaaatttttttaaatataaaaaaacatcttttttcttgcatatggctaaaaactcctaaagttatttaagcatttcttttataaaaaaaatttaaaatacttttatatgttttttctaaaaaaaacatattgcataaattttacaataagtttgtaaaatttctaaggattttggcctacatttcagaaatacaaaaaaaaattattttgtttcttttaatatgtgagattatgaacttatatgtaagacttattcctgctattaaataaaaaacaattttttttatattggcactagaacgattaagtttttaacctgataagatgaagaccttcttacagagaaagacttttcttaaaccctagaatgaccaacggttagaaaacacaacattaccttagtttacgttagacaaataaacaatacagtttacctcaggtacgacgtattaggggtgttaatacctttcttttatacaatcagttctcttccccagactcagagaccagttagggtttctagtgatcaaaatattaagtgacaactttcatttcttttttttttctactgataaaagacaagtacccttcttcttcttattttttttttaatgttgtcaatttatttataaataagagacaaaaaaaagaaaaaaaatattgtccatttattaaacaaattgttatctaaatttgtgtgtgtataatcattttcatttattagataggcatttcttacaatgattttaagttcatgtagactttaatttattgtgtgttatatgtgatatatatttcacaactcatgaaaattataatgattttgtaagataacatctcctatttctgaccccagaaaactcctagatatattctcattaattacgtttttatttaaacaataataataataataataataataataataaataaactatatatatagtttatttattattattattattattattatatatataatttgattgtgtgtataatttagccatattttttcttcgttaatcatgttgttcctaactaggcatcaagaccacaaaatcatgaggaaattatgatttcatacacgaatattgatcatctacgtacataaatttttgcactggtgaagcaacaacaatggtggaaatttggaatccaagaagccgtaattcacaccaccatacttctagaggaaatttaaacatgaaataatgatcgctccttttcatctctttctcactctctcgcatttacacctctctcccaccataaatgctagcaaaccctctctatacgctctgcaattactcctctgctgccacatcctcaccacctgttccctttcttcctttctcagcttcttcaaaaccttataatttgtctcctccttttcctcttccgtttctctctctgtgtgtgcccttttttctcccatcatagtttaatcatacagtcatcttaaaacccttttcagaacatagggtctctcttcaaaaaccagccagtaaaccacttgtctagccctaaaaactggttttgtagagacccaaaacctcttccatcacaaatctaatccttgtttccatggaacttcaaaggcttctatattttggtaagttgcacaccttgtctataaaacctttcaattcatttctcttcaccataagattctctcattttcagttttatatcatgtcctaatctttttcctaaacataaaaatggtgttttttattattttttgtgcaggaattgaaaatgtcgagtgggatggattgacctagatcttagtgggcgttatagtcttggtaatggtgtgttgaaatttatttgtcaaagcttcagagaggggtccatttagtgtcaactcttcatgctcatttgtttttttatataattttaatcttttggaacgtaaaactagaaaggacttgagacttttctttgaagttatgacccaaacaccctacagtcaatcctcctctcttactacttttctttgatgttatgaccgacccaaacaccctacagtcaatcctcctctcttactacttgtaataatctttttttttggcttttgctcaaacatcttgagagaatctatttcgcaaaccaaccccacatacagccaacgtaagcagcaaaatcaatcatgtcatatcctcaagagatagaaagagagaaagataaggatgctgcttagggtttgttggtgagagtaagatatgccttctacaatggagtttaaaggagaaaaaggttgtcagatttcaatcatcctctaaggttagtcaatcaggtaaggttcctctcactttggttgaggttcttaaaaagtgtttttattcactaaatatgcttaaacaaagtaattaaaacgtttccaagcaacatccttcttggaatgaacgcataacgcttttttttttttgagtaaaaagagagagagagagagagagaagagagaggaagataaaaggtgttatcttgcttatctggtgattagccatctcttgtaactacagctacgacagtgtggaatacacttcaccttgccctacaaatttcaaacaacatttattatgttgggaatttaacttggttttgctttttttcctccttgtactcttttttataattcatcaatgtttcctatcaataaatctttccatatagatgttaatttcttatctacaaacatctcatatatagcctttaatacttttctttacttgtacacatgatttactcacccctttagcatgtttacatggcattccttaggattattcttctttttttatttgcttatttatgattttttatttgcag

SEQ ID NO: 38 - DNA, 3940 bp, Medicago truncatula
tgattactctagagagtaagttttttccaacacatccaactaatatctctatgaccactcttcatacaacaaggaacactcacacacagtaagaaggcattgcgaaactcggtctaacttgttctcttctaggccactatttcaaaacaaaaaagtttctcacaaacaattgttttttaagaaattaatatgggatatattaacaacaacgataagctctttagtataaggtgtactagagaaaccatctaaaaaaataaactgtcatataaagtgcgtttgatttgctaaaaaaatgaaggacaggacagaacaactctagttgtccagtgtttgatttgtaaaactgtttcaggtacaggacaaactggaggcaagggacaggacaaaaactcatatttttgtccctcaccaaaccacaacacaactttttgtcccacgtacaaattgtctaaaataccaaaatagtattttgtccctaaaaaatcgtaaaacaaaaaaattactcaatgccataaaaaatttgtcatgtgttgttctgccttgtgttgtactgttctatcttgtactgttctgtccagtacttgttgttttgcaaaccaaacacacccataaagtatatacaagaacaaaggctagtcaatacccatacaaagcaaatgatccgactaccatctctgagaaccgtacacaaacgtggcgttattagcttttaaccaccaaaacgaattaaatttaatttatctaagagttataagataggagtttcaatgttgttgaatagcctattattgcgatcattctcacaaataataagtataatctgtatttttttttgaaggaagtataatctgtacttaatggatccaaaagttaaccataagtaactattaatttcggttggacattttttgtaacatatttacccttaaaacaccgttcttttaaaatttaaatgtaaatatacatcataattaaataggtccttaaaaaaaatcataactaaataggactattaaacaaattacaaatttaacaacaatacagttcaatccaaattcaaattttaaaaaatataaaacatgattattgaaaaataaatttagattaagatatcttgtacaattatcttatcttttttatctgaataattgtactcgtcttatctttttttaaatcatagcttgtgtacccttaaaaaaaatcataccttgtgtaaaaattcataatcatatttacatcgttccttttcattttataactaatttcttttcttttgattgcagggattgattcttcaataacttcgacaagaaagtcgttaggacgaacactttaaattgaaagacaactttcatgacgacatgttggtacttgtgaaagtggaggaatataactattttttaagctaatttcatccgctcgaacaacccaatttctttaattcggagattcgtccaagatattgaagactgtaacttggagcatcttcatattggtgcattgttgaaggacatcatctatataagttggaagcggcctcaagaaggttggaccaagctcaacatgatggtgcttgcaaagatacgagggttattgctggatgtggcgatctttttcgtgattcagacggtagatggatcaaaggctacactaagaagattggagcttgtgatgccttatatgttgagattttgatcgacatgatttctgataatttcaagttcaatgagaatattcctgttttagtttaccggatctgaaagttgccgaagatgagttgaaatgttcaactcaaccatacttgacgtgaaggaaataggagtgctgattggctcgttaacttaagcatttctacggatcactttaatttactaatgttggagtctccttctagcgaggtccaaagaatccttttagatgatttatccaggacttgcatgcctaggaatcttcgattagctttttagttctatttttttttctttgccctcttgtaaaaaaataaaaataaagatctttgaaagtacagaatgtatttatatatgtaatttttttcctcaaataccaatatatactactagtataagtagagtatatttacattatcgtagagtacgtgaatgaatataagtaaattcagtagggaagagtaaaaattaacgagtttggtagccgtcatcttttgcaccatctactctcaaatccaattttttttactacacaacacaataatctctctctctctctctctctctctctctctctctctctctctcacatagtctctctcatgtacactactagcaattactacacctcttacgcccaccattaaatgcaattgcaccatctcaatacactcagcaataactcatcactgccacaattttcctctccatccgttcactcttatttcctttctcttccttcaattcctttgtcctctcaccttcttcatcgtcttcatcttcttttcttcttctttctctctttaaacaatctactaccttttttaagctagaccgtccaaaaacactcatcaagctttcgttgcttaatttattaccatatacccaactttccataacttcctcaaaaaaaccttctcttcttttttcatattcatctttgaaaaaagtgtcttttctttttacttctttttgtgcaccatagtagatctacattttttcttcctcttctagcttctatctctctttagcaactacccttcctcttggtaagtggaaaaaaaaagtctttgttatcattaattcatttcacatctcattcacaccaatatcattgtttttgtaaaactaaatctgttcacaagtttttttcttttaaaaatacttatgtctccgtccatatagttagggttgctagaatgtcatatatttattttttgtttttttttccatcttttttctttctttctgattatgcttgttcctatgctgatttcaaatataacaaaagaatttaacatgcattttaattatgcttaaaaattcttagaagcataaagaaaaaaaatctggactttgatcaccccaatattttttagtttttggttataaagtgaggtcacgtttttatatttgagtatttttttttctctcatgttattgatgtttttgtttcctttttgaagtggcacattaatctcattgaaacaccgctaaagctgacagaagaatctaacaaagaattcatcatctgaaagccatttaaggatctaagaaaagagagagaaaaaattaaaagaaggattttctagttgaagcttttttgattgaaatatgcaagctggtttaatgattccagctagtaacatgcattcaatgatcggaagaaacaacaataacgttggtgtctttggtttatcttcatctctctctttatcccaggtgaatcttcttgtttttttttttccttcacatttctatcaaaatttttagtatattaaattaataataataataacaattttgttctaatgttaatttaatttgataaagggtcatctattttgactttatctttgcaaagataattattttctcttaagtcaacatttggtctttattgaaagaacaacctaaacaaacaaaaaaacctttcattgtattttaccagtccaagtatccttctcgttattcggaaaccgcgttattccttttcactttttcactatttaaattcattttcctcaaaaacatcaacttagtcaaattcacatgtttttctttttcatcaagtttctccaatttaattagaaaaaataaataaacaaaaattgtttttgttgattttgttttttgttgttgttgaatgtactatgtactatgtatgtactatactatatattatgtgttaaattgtttttgttagattgaaaacaataagcatttggaatcttaaagatctgtagaaa

SEQ ID NO: 39 - DNA, 3897 bp, Medicago truncatula
tgattactctagagagtaagttttttccaacacatccaactaatatctctatgaccactcttcatacaacaaggaacactcacacacagtaagaaggcattgcgaaactcggtctaacttgttctcttctaggccactatttcaaaacaaaaaagtttctcacaaacaattgttttttaagaaattaatatgggatatattaacaacaacgataagctctttagtataaggtgtactagagaaaccatctaaaaaaataaactgtcatataaagtgcgtttgatttgctaaaaaaatgaaggacaggacagaacaactctagttgtccagtgtttgatttgtaaaactgtttcaggtacaggacaaactggaggcaagggacaggacaaaaactcatatttttgtccctcaccaaaccacaacacaactttttgtcccacgtacaaattgtctaaaataccaaaatagtattttgtccctaaaaaatcgtaaaacaaaaaaattactcaatgccataaaaaatttgtcatgtgttgttctgccttgtgttgtactgttctatcttgtactgttctgtccagtacttgttgttttgcaaaccaaacacacccataaagtatatacaagaacaaaggctagtcaatacccatacaaagcaaatgatccgactaccatctctgagaaccgtacacaaacgtggcgttattagcttttaaccaccaaaacgaattaaatttaatttatctaagagttataagataggagtttcaatgttgttgaatagcctattattgcgatcattctcacaaataataagtataatctgtatttttttttgaaggaagtataatctgtacttaatggatccaaaagttaaccataagtaactattaatttcggttggacattttttgtaacatatttacccttaaaacaccgttcttttaaaatttaaatgtaaatatacatcataattaaataggtccttaaaaaaaatcataactaaataggactattaaacaaattacaaatttaacaacaatacagttcaatccaaattcaaattttaaaaaatataaaacatgattattgaaaaataaatttagattaagatatcttgtacaattatcttatcttttttatctgaataattgtactcgtcttatctttttttaaatcatagcttgtgtacccttaaaaaaaatcataccttgtgtaaaaattcataatcatatttacatcgttccttttcattttataactaatttcttttcttttgattgcagggattgattcttcaataacttcgacaagaaagtcgttaggacgaacactttaaattgaaagacaactttcatgacgacatgttggtacttgtgaaagtggaggaatataactattttttaagctaatttcatccgctcgaacaacccaatttctttaattcggagattcgtccaagatattgaagactgtaacttggagcatcttcatattggtgcattgttgaaggacatcatctatataagttggaagcggcctcaagaaggttggaccaagctcaacatgatggtgcttgcaaagatacgagggttattgctggatgtggcgatctttttcgtgattcagacggtagatggatcaaaggctacactaagaagattggagcttgtgatgccttatatgttgagattttgatcgacatgatttctgataatttcaagttcaatgagaatattcctgttttagtttaccggatctgaaagttgccgaagatgagttgaaatgttcaactcaaccatacttgacgtgaaggaaataggagtgctgattggctcgttaacttaagcatttctacggatcactttaatttactaatgttggagtctccttctagcgaggtccaaagaatccttttagatgatttatccaggacttgcatgcctaggaatcttcgattagctttttagttctatttttttttctttgccctcttgtaaaaaaataaaaataaagatctttgaaagtacagaatgtatttatatatgtaatttttttcctcaaataccaatatatactactagtataagtagagtatatttacattatcgtagagtacgtgaatgaatataagtaaattcagtagggaagagtaaaaattaacgagtttggtagccgtcatcttttgcaccatctactctcaaatccaattttttttactacacaacacaataatctctctctctctctctctctctctctctctctctctctctctcacatagtctctctcatgtacactactagcaattactacacctcttacgcccaccattaaatgcaattgcaccatctcaatacactcagcaataactcatcactgccacaattttcctctccatccgttcactcttatttcctttctcttccttcaattcctttgtcctctcaccttcttcatcgtcttcatcttcttttcttcttctttctctctttaaacaatctactaccttttttaagctagaccgtccaaaaacactcatcaagctttcgttgcttaatttattaccatatacccaactttccataacttcctcaaaaaaaccttctcttcttttttcatattcatctttgaaaaaagtgtcttttctttttacttctttttgtgcaccatagtagatctacattttttcttcctcttctagcttctatctctctttagcaactacccttcctcttggtaagtggaaaaaaaaagtctttgttatcattaattcatttcacatctcattcacaccaatatcattgtttttgtaaaactaaatctgttcacaagtttttttcttttaaaaatacttatgtctccgtccatatagttagggttgctagaatgtcatatatttattttttgtttttttttccatcttttttctttctttctgattatgcttgttcctatgctgatttcaaatataacaaaagaatttaacatgcattttaattatgcttaaaaattcttagaagcataaagaaaaaaaatctggactttgatcaccccaatattttttagtttttggttataaagtgaggtcacgtttttatatttgagtatttttttttctctcatgttattgatgtttttgtttcctttttgaagtggcacattaatctcattgaaacaccgctaaagctgacagaagaatctaacaaagaattcatcatctgaaagccatttaaggatctaagaaaagagagagaaaaaattaaaagaaggattttctagttgaagcttttttgattgaaatatgcaagctggtttaatgattccagctagtaacatgcattcaatgatcggaagaaacaacaataacgttggtgtctttggtttatcttcatctctctctttatcccaggtgaatcttcttgtttttttttttccttcacatttctatcaaaatttttagtatattaaattaataataataataacaattttgttctaatgttaatttaatttgataaagggtcatctattttgactttatctttgcaaagataattattttctcttaagtcaacatttggtctttattgaaagaacaacctaaacaaacaaaaaaacctttcattgtattttaccagtccaagtatccttctcgttattcggaaaccgcgttattccttttcactttttcactatttaaattcattttcctcaaaaacatcaacttagtcaaattcacatgtttttctttttcatcaagtttctccaatttaattagaaaaaataaataaacaaaaattgtttttgttgattttgttttttgttgttgttgaatgtactatgtactatgtatgtactatactatatattatgtgttaaattgtttttgttag

SEQ ID NO: 40 - DNA, 3000 bp, Arabidopsis thaliana
acgtacgtataactccatctatatatctgtacctacatatatacagtaaaaatcagaaataagttgggttattgtttttttatatatagttattttaaagaatctaggtaaagtataaacttactgaaaagaaaaacttgagtgttaaagctatagctataaggactttaaaaaaaaaaacaaagcttaagaactaggtaattaaatacgcagtatatttctctatatattcgcgtgataaattaagatgaatgcatggcttttacaaattatcacctttttaatgggtgatccgtattttaaatagcttaattgcacgttatagttataaatgcttgggccacaaagtaattaatatttctaggcatgtaaaatgaagtcttactgtgaaaaaagtgatatttcattgacttccttaaattgaaaaaacaattgtttcgtaaacaaaactcaaaattaaggtgatgatttttagattttcttcttttaaatgaaataaaataaatacatcactcaatcaacttctgtctgactaacaataatacaacctaaacttctataatatttaagaaaatgccatgtggaagaagaatcatgaaattttccttctttacaattaaatttataacaaagatatgaaataataataaaataaaatagttaaaaatataatagtcatattttttgaaagtaaaaattaaatttatatctcataaagataaatattaactataacaagtcattgaattttagttaaaaaactatataatttttttccatattataaataatctaagagtattaaaatttcagaaaattacttttaaaattgtatccttgacaaatggggactattgtctaactttttctgtaaatggagaactgtattaaagcaaatttcaatatagttaaatctttttttaatatagttaattttgttaagtggtgatttattgcatatgcataagttatgaataatgctaatgattttttaaaaataactacatatctaatagataaatgtaagtctcataggctcatagaccgttagccgtcattcctcaccacattataatattttaaataaataaaaaataaaattattttaggttgacattgtatataagatgaaaaacaacacataattttgtaacataaataaaataaattgtaacatatctctctctctctatatatatataagcgtgtaggataattaagtgtccctctcgcaccatttaatttcattgcaccctctcaattctctctgtcattactctctcatctctcttcctccaagatttgcacctacctttcaaaccttttgctcgccaacaaaaccgcgcttcacaaaaccatcagcggttttccgagaaacaaatctcagaccagacaccgctctactcttctctctctctccctctagggtttcgtcgcttcttcctatatcccagtgtatgtctcgaaaacctcatcatttctgctgttttctttattttatccattaattcatgtacacaaatttatttgtttaaagtatcattggatccattacacttcagttttcttagcatctttataaaactctcactttcatgatgttttttttttataatttaatatatcctgtatgttgaattttcagttagtcatctatattttgtcttaaattttgccttctttagcattaattaattgatttcttgcctctaatatctttcattcctctcctaatttgctttctgactttctgatttattgtattcttctttaaataatcttatcaatttctgcatagtcagagatgaaaccttcaagaaaacaataaagaggaaagattaaaggttagtattcccttgcctaccaaaaaaaacagaaaggtttgtattctcttcgtatatccttattttcattatacgtttggttttatatataaacacgtgtatatactttatagtagtagtatacatttacatattaatgtgtgtaataaaaacgtttaaatacgatgatgatgataagaaatagctggaaaaaattaatacatcacccaggccttatgtcacgttggttgtaagttgtataataactatatgttggtccgtcgcacaggtgcacagatataatactatttttttcatttcaatttttttttctttcttaatcgccaaatagtagtttacactttttcctgaagagtttttattttttgaaaatctactaatgattatatttaattaaattttgttttgttctcacgaaaatattgtttttttaataaacaggatagagttgggaatttatttgtacctactttttcccattttatttgctttgaacaaatgagtccaacatttctcttttcgtcttctctttcctatcccatctaaatcaaaactgatcaaaatacctcgaaattttaaattaaatcaccatccatcaaagctattatagtgtagaaattttaaagttttttctttggacaacaattgatttccatctacactacatatgatatgactcttgaatcaatcatagtttttatttcagtctgctgattagtttttttcttttcttttaaaagggtaaaaaatcggtagtttcgaataattttgagtatgtgaaaattcattatttttgggttggttattcaataacaaattaatttgtgattgtgatgtcttttttatgcaaggctcttttttcttgctttcaattagtgggtcctttgtttcctacaatcatctccaattcttctgtttgcttatatcattttgtatgatcttcaagaagaaagataaacgactccgaagaaagatttaagttattgttgttcatacaaaaagaaggttgtaaagttgttgacgtggacaaaagtattgccatatttttccagcctcgaagaaatttcccttcttcttcaaaccctaaattttgacaaaactctctacttttttttgcttctagggtttgctttcagtttccggagtataagaaaag

SEQ ID NO: 41 - DNA, 3641 bp, Glycine max
tatatcatttgtttttaatgaagttatttttggtttagtttcttttaatgaagttactataaatttaattatagttgttcaaactaatatttagtccgaacaaaatacaaattggctaccgctatgcgctatctaacaaaattttccgagtcataacatgcagatgcatgcggttcaaaattaatacttgcactcatcataaaatttgttcatatataggtaagactttccacgtcaaatataaattaaagtgcatagaacaaaaataattaaattgcaaatgtattttatggtaaattgcaattctttataataatgtactatacaatatttatttagaaaacaaaatcttgcgttacgaattaatttttttaatgtagttacgaattgaattacacggttacaagtaccatgcatttttatatgctaagagaaattcatatttttaatcaatcttttacgaagtgactagcttacacggttacactacattgtaatcaaattatattatatgtagtatcttttttcttttataaaatatattactagtaagtatcttgtgcggatacttttaaacacaaagaaaatataaaaaatacaaaaatatataattttaaaaatataaaaatataatcaacagaatgatttttcttaataatttgaaaatattttatcatgcataatgttaataaaagaaactcaagtattaattaaagaaattaaaaaactaagaaccttctttaatatgattaattgaggaaatatatcgatttaacacatttcaagaaataaaaaatacatgcttatgtaaaatattaaaaatatatataaatgttatatctccgttaaaaacacgtttaaatttagagttcaattaaaatatattgaaaatgtttttttttgtagtattatctaatactgtataaattataccatgtaagataatattcttgattcttgtaagaattactttaaaaatatatctaaacggtttgtaatcatgcaatattataaattttcttatattccgtaaaaaaataatattttattataataatatataaaatcaaactcttatattcataatataggaaatagtagtcttcaaaaaaacaggaacgaataaatcatctcaatcttatcatatcaattattaattacctaatttctttaattaattaaattatcaataaaaaaaaggtgaactttggatcaaataatataaagttatttcaaattaaccaatgttgtaaaatttggatcttaaatatacagtcacattaactttgtaaacaatcttacgcatttgagcaaggttacttccgctgaaagatgtatataagatgaatttgtttaaagttttaaaagataactttaaaataaacattttttaagtaataaatatgggccaatttgtttaaacttgaaaaaataatttaaaaataagtacttttttaaataagtagatagaatttgtgtcagtttgtttaattttatttattgaaataaatgcttattttattaaaataaataactttctatttttttaatgtgttttcctaaattatttctacttgttttaaaaagaaaatatttgcaaaaagacatttatataaaaaaattatttttaagttttttaaaaaaatttaaacaaactcaccgtttgtttcttcaaataagcggatttttttaaaaatagaaacagttaaaaaaaataaaataaacataaaaataaatattttattaaaataaatacttattttaacaaataagtttaaacaaattatcacatgatttacttcttaaaaaaacaaaaaaaaactgtttattttaagtaaaaaaagtctagacaaacacatgataaaatcataaaactacttattttatttttaaaaaaatacttattttaaaaatatgctttaaaataattagctcataatttgcatcaaaaatcacaactcacgaattgggagtgaataaattaatagtaattagcttggctctttttcttattttttactccctattttccttttttataaggcttactagactcttttgcatgaccagcgtctctggtcaaaagaattaataataataataataataaaattcattaaaaatcacattaaaagaatattaataatcacattaaaaacatatttaaaatcacattaaagcacattaatgacattttcaatagtactaagaactctttcaattcttgaaccaatattactcttatcttaatggaaaatactctacacttatccgaacgaaaaaactgcaaaagagaagaagaaatgaatggagtgacacgcacaaattaatttcaagataccagcacttagcaatttagcatttgtttggtagccgtcattcgttgcattgcattgcatttgcatttgcattgcaccgtcaactcgcaaaatatttataagttttatactacaccaaaccaaaaaatatgctgcgtctctttctctctcccctctctagcaattacacctcttttgccctccattaaatgcaattgcaccctctcaatacgctctgcaattactcttcgctgccacattttcctccatctgttccccacttctctctctccttcaatgcccttgtccctctctcttcttcttcttcttcttcttctcactttctctctgtaacaccttctcttcatgatatagcttcttcaccttttttttctttcttttctttgttaccatatataagtaaactagattccataactgtcccaagcccttccttcaaaagggtcctctcttttcaacccaaaacagatctacaccttcatcttccaccaccactctcactggtaagtgctaaaaaatattgataataaaagcttctgtcgcaaccagggtcgcggcgtgtttgtgtggaacattcatgttttgttaaggttctctaaggtcacatttgtttttttttttttttaaacgaaactaatgaagctgtttggtacattttgtgagttctactaacattttccgggtgagtcgcttgcagctagggctgtgagaaaaggaacgttattaggtctgtaagaaaaaagaaaatatcctgaaatataggatgcgttgtaggattctccgagatcttcgtgttgttttattttataaataaaaaagttttgattttgttttgtgaaaaggcaaaagatcagataagggttacaatatttcttttcttttttattctgtttacatatattgatgatatatatatgcatagcgtatatttgtttcgaaattttgataagtttttatctttttaattttttttcggccgtttgtataactgagttttgtagtaacacactgactcgctttgacattgtcatctgacagaatccaagggctcaacctcttaagctttttctctatccaagaacctcttaagagagagaaagaataagagaaagagaaagtgagagagccaattctacatttgttggtggtggtttttgaggcatgtgaaataatccaagggctcaacctcttaagctttttctctatccaagaacctcttaagagagagaaagaataagagaaagagaaagtgagagagccaattctacatttgttggtggtggtttttgaggcatgtgaaat

SEQ ID NO: 42 - DNA, 3509 bp, Glycine max
tatatcatttgtttttaatgaagttatttttggtttagtttcttttaatgaagttactataaatttaattatagttgttcaaactaatatttagtccgaacaaaatacaaattggctaccgctatgcgctatctaacaaaattttccgagtcataacatgcagatgcatgcggttcaaaattaatacttgcactcatcataaaatttgttcatatataggtaagactttccacgtcaaatataaattaaagtgcatagaacaaaaataattaaattgcaaatgtattttatggtaaattgcaattctttataataatgtactatacaatatttatttagaaaacaaaatcttgcgttacgaattaatttttttaatgtagttacgaattgaattacacggttacaagtaccatgcatttttatatgctaagagaaattcatatttttaatcaatcttttacgaagtgactagcttacacggttacactacattgtaatcaaattatattatatgtagtatcttttttcttttataaaatatattactagtaagtatcttgtgcggatacttttaaacacaaagaaaatataaaaaatacaaaaatatataattttaaaaatataaaaatataatcaacagaatgatttttcttaataatttgaaaatattttatcatgcataatgttaataaaagaaactcaagtattaattaaagaaattaaaaaactaagaaccttctttaatatgattaattgaggaaatatatcgatttaacacatttcaagaaataaaaaatacatgcttatgtaaaatattaaaaatatatataaatgttatatctccgttaaaaacacgtttaaatttagagttcaattaaaatatattgaaaatgtttttttttgtagtattatctaatactgtataaattataccatgtaagataatattcttgattcttgtaagaattactttaaaaatatatctaaacggtttgtaatcatgcaatattataaattttcttatattccgtaaaaaaataatattttattataataatatataaaatcaaactcttatattcataatataggaaatagtagtcttcaaaaaaacaggaacgaataaatcatctcaatcttatcatatcaattattaattacctaatttctttaattaattaaattatcaataaaaaaaaggtgaactttggatcaaataatataaagttatttcaaattaaccaatgttgtaaaatttggatcttaaatatacagtcacattaactttgtaaacaatcttacgcatttgagcaaggttacttccgctgaaagatgtatataagatgaatttgtttaaagttttaaaagataactttaaaataaacattttttaagtaataaatatgggccaatttgtttaaacttgaaaaaataatttaaaaataagtacttttttaaataagtagatagaatttgtgtcagtttgtttaattttatttattgaaataaatgcttattttattaaaataaataactttctatttttttaatgtgttttcctaaattatttctacttgttttaaaaagaaaatatttgcaaaaagacatttatataaaaaaattatttttaagttttttaaaaaaatttaaacaaactcaccgtttgtttcttcaaataagcggatttttttaaaaatagaaacagttaaaaaaaataaaataaacataaaaataaatattttattaaaataaatacttattttaacaaataagtttaaacaaattatcacatgatttacttcttaaaaaaacaaaaaaaaactgtttattttaagtaaaaaaagtctagacaaacacatgataaaatcataaaactacttattttatttttaaaaaaatacttattttaaaaatatgctttaaaataattagctcataatttgcatcaaaaatcacaactcacgaattgggagtgaataaattaatagtaattagcttggctctttttcttattttttactccctattttccttttttataaggcttactagactcttttgcatgaccagcgtctctggtcaaaagaattaataataataataataataaaattcattaaaaatcacattaaaagaatattaataatcacattaaaaacatatttaaaatcacattaaagcacattaatgacattttcaatagtactaagaactctttcaattcttgaaccaatattactcttatcttaatggaaaatactctacacttatccgaacgaaaaaactgcaaaagagaagaagaaatgaatggagtgacacgcacaaattaatttcaagataccagcacttagcaatttagcatttgtttggtagccgtcattcgttgcattgcattgcatttgcatttgcattgcaccgtcaactcgcaaaatatttataagttttatactacaccaaaccaaaaaatatgctgcgtctctttctctctcccctctctagcaattacacctcttttgccctccattaaatgcaattgcaccctctcaatacgctctgcaattactcttcgctgccacattttcctccatctgttccccacttctctctctccttcaatgcccttgtccctctctcttcttcttcttcttcttcttctcactttctctctgtaacaccttctcttcatgatatagcttcttcaccttttttttctttcttttctttgttaccatatataagtaaactagattccataactgtcccaagcccttccttcaaaagggtcctctcttttcaacccaaaacagatctacaccttcatcttccaccaccactctcactggtaagtgctaaaaaatattgataataaaagcttctgtcgcaaccagggtcgcggcgtgtttgtgtggaacattcatgttttgttaaggttctctaaggtcacatttgtttttttttttttttaaacgaaactaatgaagctgtttggtacattttgtgagttctactaacattttccgggtgagtcgcttgcagctagggctgtgagaaaaggaacgttattaggtctgtaagaaaaaagaaaatatcctgaaatataggatgcgttgtaggattctccgagatcttcgtgttgttttattttataaataaaaaagttttgattttgttttgtgaaaaggcaaaagatcagataagggttacaatatttcttttcttttttattctgtttacatatattgatgatatatatatgcatagcgtatatttgtttcgaaattttgataagtttttatctttttaattttttttcggccgtttgtataactgagttttgtagtaacacactgactcgctttgacattgtcatctgacagaatccaagggctcaacctcttaagctttttctctatccaagaacctcttaagagagagaaagaataagagaaagagaaagtgagagagccaattctacatttgttggtggtggtttttgaggcatgtgaaat

SEQ ID NO: 43 - DNA, 3000 bp, Sorghum bicolor
ttcactactttattattttctgagcaggaaaaagttatgtttcctttgcaaaaaatgggacccacacgcacggcaagaagccgtgccgtgccgtgccgcggcatggaaacagtactacactccaggactgcatgcactccgttgcagtgaaccatgcatcgatctcttcgcccgttcctctggaaactcataacttttttttttaaagagagaaacccctcaaacaaattaaattggatcatttgcacggatttcatcttgccggtcgtctgttgtgtatactgcaaatgagaattacgtattttgtggaagtccttcgtcttgtttttttatccttggccttgtttagtttcgaaaaatttcggatttcgctattataacactttagtttttatttgacaaatattgtctaatcatgaactaactatgatcaaaagatttatctcgcgatttacaaacaaattgtgtaattagtttttatttttgtttatatttaatgatttatgcatttgccgcaagattcgatgtgacggagaatcttgaaaactttttggatctctgagggaactaaacaacgcccttgtctaacacatgtatccccaatttcatcttgacggagggatataacgatcgagtcaaacctctgcatggatgggtgcactattggcgtgtagcagtatatggcgccaggaaaaagttaaaactaaagaaatggatcttttaacaagtactccctccgtcagcaacatgccggagctgtgtttaaagttagttttaatgaagttttattaaagttttatacatattaaatatgctgatgtaacattgtattgatgaagagagatgataaaaattttatgagataaagttttattctaataaaactcttctgcactatttctaaatatgactgcgttaaaaattgagtcatgaaatccgccgtcgaggatggcctaaagggcactcacaatgcagactctatcatagagtctaaggttatttattacctcgaacaatgtggacttagagtctaaataagacttggagtcttattttttctatctttttcttcaataaatataatgacatatcaacaaaatatcataaataatatgtaattaattgtcttagactctatgatagagttttgcattgtgaggctagtctcaatgcatgtttcatgagagtgtcatgcacattaaatagggtgtcacataagcaaaattgctgacttggcagggtcattaaatgaaggagtttcatcagatgagagagaagtttcatcctcatgaaactcatatggctcgattatctagtttatagtcttggtaactgtaccatgaaactatacattgacactggctgagtgtcctagcatggctcttatcctttggccagaactgaagagacgctatgtatatccatggctatctggaactttcctctctccatcactcagtaattacgccggttatctaatctgaaacatttgtcaatgtactgagtattcagcagaaaacgtaccacctgccgaagtactatatcgtagccgcgattaattgactaataagacaattgaaaaatagactgatattaccctcttagcctataaaagaatgtaactatgaaaccggtcaaactaatttaaatttaattagatttatagtaaataatattagtatttatatctttaaataaatttataataaaactgtattctataacaaacatatattctataactaatttaataatatttattttatataataatagataacattttttatataaatttagtcaaagtttaaacgatcgatctcgttacttaaaaaataaggagtagttagtatttttttattcgagttacagtactaaatgatatataagtctatctctacatggaaatgcatgatcatcgacttgccagcctttattttctcctctccttcatgatgactatacatagctcgaaaataaattaatatatatgtcatgcagatacatgaacgttcattttcacattcatttgccaaaaaaactacatatgacgacgtccaataaatccaaaacacatgacatatcgtgcatgtttctccttatatacaagtactataccaggccttgtttagttccaattttttttgcaaaatagaaatagtagcactttcgtttgtatttgataaatattgtctaatcatgaactaactagtctcaaaatattcgtctcgtcaatttcgtccaaactgtgcaattagtttttattttcgtctatatttaatacttcatgcatgcgtctaaagatttgatgtgatggagaatctgaaaaattttgcaaaattttttgggaactaaacaaggccccaatatacttgtagaaatagaaatatataataataaaaaatcatgcatccgtctctctctcgctctgctagcaattacgatacggcctctcaataaatgcggattgcaccacctcaacactcgtccgcaataactccttcctcccttctccacattctcttccacctccgtccgttcccctccccttcctcttcctctcctcccccttccatggccgccgcttagcttcgttctcaaggcctcctccctctcgccacacacctcctgctagctacccttctgagcttgcaaagttttgccgcatcacatcgatcttgagagctgcagcaggcagagatcgatcagagttctatttttgcagaggcacacaaacatatatagttcctgtatctgctagatctcactgccagccagctcgcagtgaagcttctctgggctaccttgtcgctagatctgttgctggtcgtgctgttacttggcaggcaaggtatacatctccatataggaataggattggcgccgcctgttttcttgggttgtgagggagatatactacgcatgtgccagtgaataaatgggaagcagctagtgaggaggcaataagaatcagggtttgagaggtcgcgagaggagaaa

SEQ ID NO: 44 - DNA, 2500 bp, Sorghum bicolor
ttcactactttattattttctgagcaggaaaaagttatgtttcctttgcaaaaaatgggacccacacgcacggcaagaagccgtgccgtgccgtgccgcggcatggaaacagtactacactccaggactgcatgcactccgttgcagtgaaccatgcatcgatctcttcgcccgttcctctggaaactcataacttttttttttaaagagagaaacccctcaaacaaattaaattggatcatttgcacggatttcatcttgccggtcgtctgttgtgtatactgcaaatgagaattacgtattttgtggaagtccttcgtcttgtttttttatccttggccttgtttagtttcgaaaaatttcggatttcgctattataacactttagtttttatttgacaaatattgtctaatcatgaactaactatgatcaaaagatttatctcgcgatttacaaacaaattgtgtaattagtttttatttttgtttatatttaatgatttatgcatttgccgcaagattcgatgtgacggagaatcttgaaaactttttggatctctgagggaactaaacaacgcccttgtctaacacatgtatccccaatttcatcttgacggagggatataacgatcgagtcaaacctctgcatggatgggtgcactattggcgtgtagcagtatatggcgccaggaaaaagttaaaactaaagaaatggatcttttaacaagtactccctccgtcagcaacatgccggagctgtgtttaaagttagttttaatgaagttttattaaagttttatacatattaaatatgctgatgtaacattgtattgatgaagagagatgataaaaattttatgagataaagttttattctaataaaactcttctgcactatttctaaatatgactgcgttaaaaattgagtcatgaaatccgccgtcgaggatggcctaaagggcactcacaatgcagactctatcatagagtctaaggttatttattacctcgaacaatgtggacttagagtctaaataagacttggagtcttattttttctatctttttcttcaataaatataatgacatatcaacaaaatatcataaataatatgtaattaattgtcttagactctatgatagagttttgcattgtgaggctagtctcaatgcatgtttcatgagagtgtcatgcacattaaatagggtgtcacataagcaaaattgctgacttggcagggtcattaaatgaaggagtttcatcagatgagagagaagtttcatcctcatgaaactcatatggctcgattatctagtttatagtcttggtaactgtaccatgaaactatacattgacactggctgagtgtcctagcatggctcttatcctttggccagaactgaagagacgctatgtatatccatggctatctggaactttcctctctccatcactcagtaattacgccggttatctaatctgaaacatttgtcaatgtactgagtattcagcagaaaacgtaccacctgccgaagtactatatcgtagccgcgattaattgactaataagacaattgaaaaatagactgatattaccctcttagcctataaaagaatgtaactatgaaaccggtcaaactaatttaaatttaattagatttatagtaaataatattagtatttatatctttaaataaatttataataaaactgtattctataacaaacatatattctataactaatttaataatatttattttatataataatagataacattttttatataaatttagtcaaagtttaaacgatcgatctcgttacttaaaaaataaggagtagttagtatttttttattcgagttacagtactaaatgatatataagtctatctctacatggaaatgcatgatcatcgacttgccagcctttattttctcctctccttcatgatgactatacatagctcgaaaataaattaatatatatgtcatgcagatacatgaacgttcattttcacattcatttgccaaaaaaactacatatgacgacgtccaataaatccaaaacacatgacatatcgtgcatgtttctccttatatacaagtactataccaggccttgtttagttccaattttttttgcaaaatagaaatagtagcactttcgtttgtatttgataaatattgtctaatcatgaactaactagtctcaaaatattcgtctcgtcaatttcgtccaaactgtgcaattagtttttattttcgtctatatttaatacttcatgcatgcgtctaaagatttgatgtgatggagaatctgaaaaattttgcaaaattttttgggaactaaacaaggccccaatatacttgtagaaatagaaatatataataataaaaaatcatgcatccgtctctctctcgctctgctagcaattacgatacggcctctcaataaatgcggattgcaccacctcaacactcgtccgcaataactc

SEQ ID NO: 45 - DNA, 1204 bp, Arabidopsis thaliana
atatcggttgttgacgattaaccatgcaaaaaagaaacattaattgcgaatgtaaataacaaaacatgtaactcttgtagatatacatgtatcgacatttaaacccgaatatatatgtatacctataatttctctgattttcacgctacctgccacgtacatgggtgataggtccaaactcacaagtaaaagtttacgtacagtgaattcgtctttttgggtataaacgtacatttaatttacacgtaagaaaggattaccaattctttcatttatggtaccagacagagttaaggcaaacaagagaaacatatagagttttgatatgttttcttggataaatattaaattgatgcaatatttagggatggacacaaggtaatatatgccttttaaggtatatgtgctatatgaatcgtttcgcatgggtactaaaattatttgtccttactttatataaacaaattccaacaaaatcaagtttttgctaaaactagtttatttgcgggttatttaattacctatcatattacttgtaatatcattcgtatgttaacgggtaaaccaaaccaaaccggatattgaactattaaaaatcttgtaaatttgacacaaactaatgaatatctaaattatgttactgctatgataacgaccatttttgtttttgagaaccataatataaattacaggtacgtgacaagtactaagtatttatatccacctttagtcacagtaccaatattgcgcctaccgggcaacgtgaacgtgatcatcaaatcaaagtagttaccaaacgctttgatctcgataaaactaaaagctgacacgtcttgctgtttcttaatttatttctcttacaacgacaattttgagaaatatgaaatttttatatcgaaagggaacagtccttatcatttgctcccatcacttgcttttgtctagttacaactggaaatcgaagagaagtattacaaaaacatttttctcgtcatttataaaaaaatgacaaaaaattaaatagagagcaaagcaagagcgttgggtgacgttggtctcttcattaactcctctcatctaccccttcctctgttcgcctttatatccttcaccttccctctctcatcttcattaactcatcttcaaaaataccctaatcacattttgtaacaataatacaattatacattaaaactctccgacg

SEQ ID NO: 46 - DNA, 2605 bp, Arabidopsis thaliana
tgaccaaattctagaagtgacttgataacatgagaggctataaagctggttcctccggtaaccaagtactctgccattttattaggctcctctgattttgtgtaacattgacaaactagatcatgcgattagatggtctaattttattttattttgtgttagaaggatgttcaatcctggttgatttagtttatgtttgacttttttttatgtagtctttgaataatagtagttacatctaactttcataaagacttggattagtataacctaattataagctttgggcttgaagcaaatataatgaactgaatgtgggcttttaaagtatccaaagaggtttatgaaatgtgatatattttttttggtcttcaatctcttgaaaattggttagcaatccattggcagttgaaggctctctcagagaccttgactagaaggcctcaaaggcaaaggaaggtggaaggaaaaatcaaaattcccggagctgaaagttgacacaaaggaatcaacctagttctttcttgtcttagcttttttgaagggaaatgaaaattgacacaaaagaaggtggaaggaaaaatatgatgcttgtcctttattggacatatcattttgcagaatatatattcttcctagcattttgcatgcattgtgtctaggttgtcatgttgtggctggtttactaagttcctagtacaatgaacaaagcgccagagctgaaagttgaaataacaatcgtcaacatcccaaccgccttaacattaaaaccaaccaaaaaaacaaaaacacatcccaaccgaaagcagcaatccaggaagattagtttatgtaaatgacaaacataaatatgaaaccgtcacatagttgagagtcgccgtgaatatttactttttaaataaaaagatatggttagccgctggttggtctgacaccccatgtatcattatactcattatccgtatgaaggaccattttttcatataaggatatacacgtttgtaacgtatgcagagccaacaccaagtatataacttgtactgtcgtctctgattctgttaaagcggttaactagattattgactatgataattcaatgtaacaccaatttatgccccggacaaaaaaaaaatggtgaaaccaaaatatttgatttgcatcccagttactatttccctgcaatgatatgggggcggcggtttggagatatcgccaatgccacaatttgtcgtaaaaacagttaaacattttactcactagtcactccccacaaaaaaaacgatacttagttccactctctactactacaaaacttgtatacattaaaaaacgatttttattgagtagacattaatgatcggcttataagtctaaacaagtaatgtgacagaattcacgtgaacaaatgctcgagtgggatgtttttattgcttctcaagttggtgatctttaatatcgccaagattaggttgtgcattaaatttggattactttttataaattaaatcaagatatggatatgataaactttctctcttttcttttagttaacatactttatagactttatactacattagattaattgcagatttaaacaatgtttaaaattacaaaaacgttaaatgtcatattttccatataaattttgttttacgtaaaagcaatttacatgaattttgataaaatcatgaaaaaacagaagcggtgtccaagattggggatgaatgagaaaacaccgcactgatagtaactgaaaagaatgtaaccagtctcacgatggggatggcggagagaaagagagagacaagacagtagagaaaagaaggtacgacggagagatgaaggttggacagagagaacaaaacgagaacggcaatggccgggaaaaaaggagagtagggaggaaaaaaaaaagaattttgtttttttagcttttgtagggttttttgttagtcgtaaaatataaattataatatcaaagaaaataatgagttaattttaaagaaggttagatgatatttttcacaagtttttgttgatatagtaaacccacaattttattttgtcattcaaagtaaattttcaacaaaatatagctgttgctggtcacattttaacgggaaaaaataattcttgtacctggatgtataacctctgaaccttgtattacaaatttacaaaacacattgatctcaatcagaccgaacatgtatatcgagtcaactgacaaatctcttttcctactcttgttacatattctttctaggaaaaaaaaatgctttcaggctcaatgaaatgaattaaaacagcaaaaggttggtaaaagtctttttccccataatcatttgctccataattgacgtttgtctggcaacaactggaaacacagatatagaaaaaaagattggacagtaaatcataaaaaaaaaaaagcaaaattaaatagaaagacgaagcgagagaaagagcgttgagtggcgtgagagtttgagtccgaaaattaactcctctcccatctgccaactttcctctgtttctcctttatatcccaaacctattcttcctccacacctcatcataggcatagcaaaactcttccaaa

SEQ ID NO: 47 - DNA, 2500 bp, Arabidopsis thaliana
tgaccaaattctagaagtgacttgataacatgagaggctataaagctggttcctccggtaaccaagtactctgccattttattaggctcctctgattttgtgtaacattgacaaactagatcatgcgattagatggtctaattttattttattttgtgttagaaggatgttcaatcctggttgatttagtttatgtttgacttttttttatgtagtctttgaataatagtagttacatctaactttcataaagacttggattagtataacctaattataagctttgggcttgaagcaaatataatgaactgaatgtgggcttttaaagtatccaaagaggtttatgaaatgtgatatattttttttggtcttcaatctcttgaaaattggttagcaatccattggcagttgaaggctctctcagagaccttgactagaaggcctcaaaggcaaaggaaggtggaaggaaaaatcaaaattcccggagctgaaagttgacacaaaggaatcaacctagttctttcttgtcttagcttttttgaagggaaatgaaaattgacacaaaagaaggtggaaggaaaaatatgatgcttgtcctttattggacatatcattttgcagaatatatattcttcctagcattttgcatgcattgtgtctaggttgtcatgttgtggctggtttactaagttcctagtacaatgaacaaagcgccagagctgaaagttgaaataacaatcgtcaacatcccaaccgccttaacattaaaaccaaccaaaaaaacaaaaacacatcccaaccgaaagcagcaatccaggaagattagtttatgtaaatgacaaacataaatatgaaaccgtcacatagttgagagtcgccgtgaatatttactttttaaataaaaagatatggttagccgctggttggtctgacaccccatgtatcattatactcattatccgtatgaaggaccattttttcatataaggatatacacgtttgtaacgtatgcagagccaacaccaagtatataacttgtactgtcgtctctgattctgttaaagcggttaactagattattgactatgataattcaatgtaacaccaatttatgccccggacaaaaaaaaaatggtgaaaccaaaatatttgatttgcatcccagttactatttccctgcaatgatatgggggcggcggtttggagatatcgccaatgccacaatttgtcgtaaaaacagttaaacattttactcactagtcactccccacaaaaaaaacgatacttagttccactctctactactacaaaacttgtatacattaaaaaacgatttttattgagtagacattaatgatcggcttataagtctaaacaagtaatgtgacagaattcacgtgaacaaatgctcgagtgggatgtttttattgcttctcaagttggtgatctttaatatcgccaagattaggttgtgcattaaatttggattactttttataaattaaatcaagatatggatatgataaactttctctcttttcttttagttaacatactttatagactttatactacattagattaattgcagatttaaacaatgtttaaaattacaaaaacgttaaatgtcatattttccatataaattttgttttacgtaaaagcaatttacatgaattttgataaaatcatgaaaaaacagaagcggtgtccaagattggggatgaatgagaaaacaccgcactgatagtaactgaaaagaatgtaaccagtctcacgatggggatggcggagagaaagagagagacaagacagtagagaaaagaaggtacgacggagagatgaaggttggacagagagaacaaaacgagaacggcaatggccgggaaaaaaggagagtagggaggaaaaaaaaaagaattttgtttttttagcttttgtagggttttttgttagtcgtaaaatataaattataatatcaaagaaaataatgagttaattttaaagaaggttagatgatatttttcacaagtttttgttgatatagtaaacccacaattttattttgtcattcaaagtaaattttcaacaaaatatagctgttgctggtcacattttaacgggaaaaaataattcttgtacctggatgtataacctctgaaccttgtattacaaatttacaaaacacattgatctcaatcagaccgaacatgtatatcgagtcaactgacaaatctcttttcctactcttgttacatattctttctaggaaaaaaaaatgctttcaggctcaatgaaatgaattaaaacagcaaaaggttggtaaaagtctttttccccataatcatttgctccataattgacgtttgtctggcaacaactggaaacacagatatagaaaaaaagattggacagtaaatcataaaaaaaaaaaagcaaaattaaatagaaagacgaagcgagagaaagagcgttgagtggcgtgagagtttgagtccga

SEQ ID NO: 48 - DNA, 3455 bp, Glycine max
gagtatttattgagagaatacttgcgagattctttttaatatgttatttactaattattattatttaaaatttattagaaatattttttaaatctcatttcttctattaattttaatcaataaaaaagaaaaaatatattaaaaagtatgctacatatctcatttgttaaaataagagtttattaacttaggagagttttcataagttcacaatttaatttgattctgaataaaaaaaaaagcttatagaatatttgtataactaattaagtctaaataaattttacataaattgtttcaaaccctctaatatatgcactagctcctaactatcttttattatatttaattgcaattttaatgaaatcctcttttgtttcagaagcttatagaataattattttcatttaataaatggtttttatgattctgatgtaatattttaattattttctctctctctctctctctctccctatatatatatatatatatatatatatatatatatatatatatatatatatatatatatatatatatatatattctcctaacaaacctttaaggatttatccaccgctgcatatgccaggctgaaaaacaattatttcattttcgtgggtgtatatataaaaaaaacttgtggaataagagaggtgttgatcgatgagctgtaataaccttcaatcttgagcttcaaacaaactcaagttatggtcttccctatagctagctaatattttttggtgttgatagctagctaatattttggactgcactgtttacactcaacagttcaatttacaccaacttaaccaacaaatcttccttcgattttctgctgcccattgaaactctgcatgtcaaaatgctacttgtcacaaataaaaaaggttgagaaaaaggataataagggaataacaacaatatatacaacatgagcatccgtttactatacgctgcttaatgtcatgcacagtacttatctaagcaaatttttttgacaagatgtgaatgatgtaacaataaacatttcatctctttctataatatatacttagttaggttattatattcgtacaatcagcttctgtatcattttatttccactctcttttttatcttgttttttttcatttctcatcatatttaccaattttttgataaaaaataaccatatttaccgatttttctctctttaatttatttttattttttttatccctctatgtttatctttcttgcacagttgcacttgtaaataatacccttataacttttttcctatatactttcgcaattataatacgcggtttgtctgtccgttgactgttgctatatgtagtatatagcagtacttatttatttattttatcagtacagtacttatttatttcagtgtacgaaagcggttgtttttattttcagatttaaatttgaattcaacctcgtcataatccccaatccaagaacaaagacaaaatttagaagggtacggagaacttaaagtctcacaaatccttttttaattccggatatccacaaattaaccggaagtaggactaattcctgaaaatattaaaatgtatttagtttagggaattaattttttctataaatatttttaatttaatacatatagatgtcgaaattatattaaacctctaattacaaacatataatgatattgagatatacatgattgatcaggagttaaaaatataaaaacaaaaaaagtgaatgaagaaaaaaaaaagaaaataaattgtgagtttaaatttttccagtgatattttaaaaaaataataataaattaatatttatcgtcgataatattagtatctcttactccccttgctctataggctcgaacttattatgattgatggttgtcattcatatgttccactaataaaaggagtaagattgacaaatgaataactagttaaggtgagtgcattaaatcagtaagatacaatactcgttataaattattaaatgaacgaatagtcaatgcttgactgttgacaacctttgaatagtcaatgttatctatttatccttagatggactttggcaacattgatgttaatccagagtggaatgtaaagttttaacgcatagcatgtctaaaatgatatgtatgtagtgtagaatctttatatgtgttatttttttttataaagatgaataatcaataataaagtttatgactgttttccattgatgttatgataaaattaaataaataaatccaaggcaatcacttcaaagacgttataattagacaatatcagcttcttcttctttttttctaaaaatgataaggataaataagtatgaattaatcataacagcacatctttttgtactaaaagatgattcattttaaaaaggtaagcattacgttacgaataaatttgttttcatgatattttgtttgtatgcaacatatttttcaatacaaaaatatttttatataattcaaactaaacataattttaaaattattttttagctaacacaataaaatttatataattaatttaaaaaataattgtgaacaaaataaatcagtaaataattttttcattataagatagcctaaaattattttttataagatttgtgtaaaaataatatataataaaagaaaatatgttaaaaactgagcaatgctattgggtacaaatagcataaacacaaaaccaaacgactagaaacgtgacttaatattatttttaaaaaatatatatattaattaacttttttcataaatataaaataggttttggtagaaatcacagttgatgcaaaaccaattcgtacaagacagcattttcctttaaaaaaattgtgtatatttgcctcagccacacgaaagcctaattaataagttatctcattttggaagtacgttgtatctacatgtgaacgtatttaaatgtaactaaatccatgtttaatgaaactttcggcgttgatctgacacatggttttattttaattttttttcgtttggatccatgagattgaggtgtgggtgcactttttttggtttgtgttttattatcattgttataagatcacacagacgcacgtacggagaggagagatatagaagtagttgcaattgcaaagaaggccgtgtcccaatttccctttgaaagcacaaatttaatgatgaaaggaagagaagaaataaaagtatgtttacgggtgttagggtttagttagatgtggaaggggtggagttatgaaaattaataccaagttaagtgagcgttgagtgacgtgaagtcttacattaatacctctcatctgccccgttcagaccttagggtcccttggcctttaaaacctcaccacccctacactgagttattatcattcaagcaccattcttctcgatcttctctttctcaaccgaaccaaattacagatttaacaag

SEQ ID NO: 49 - DNA, 3000 bp, Glycine max
gagtatttattgagagaatacttgcgagattctttttaatatgttatttactaattattattatttaaaatttattagaaatattttttaaatctcatttcttctattaattttaatcaataaaaaagaaaaaatatattaaaaagtatgctacatatctcatttgttaaaataagagtttattaacttaggagagttttcataagttcacaatttaatttgattctgaataaaaaaaaaagcttatagaatatttgtataactaattaagtctaaataaattttacataaattgtttcaaaccctctaatatatgcactagctcctaactatcttttattatatttaattgcaattttaatgaaatcctcttttgtttcagaagcttatagaataattattttcatttaataaatggtttttatgattctgatgtaatattttaattattttctctctctctctctctctctccctatatatatatatatatatatatatatatatatatatatatatatatatatatatatatatatatatatatattctcctaacaaacctttaaggatttatccaccgctgcatatgccaggctgaaaaacaattatttcattttcgtgggtgtatatataaaaaaaacttgtggaataagagaggtgttgatcgatgagctgtaataaccttcaatcttgagcttcaaacaaactcaagttatggtcttccctatagctagctaatattttttggtgttgatagctagctaatattttggactgcactgtttacactcaacagttcaatttacaccaacttaaccaacaaatcttccttcgattttctgctgcccattgaaactctgcatgtcaaaatgctacttgtcacaaataaaaaaggttgagaaaaaggataataagggaataacaacaatatatacaacatgagcatccgtttactatacgctgcttaatgtcatgcacagtacttatctaagcaaatttttttgacaagatgtgaatgatgtaacaataaacatttcatctctttctataatatatacttagttaggttattatattcgtacaatcagcttctgtatcattttatttccactctcttttttatcttgttttttttcatttctcatcatatttaccaattttttgataaaaaataaccatatttaccgatttttctctctttaatttatttttattttttttatccctctatgtttatctttcttgcacagttgcacttgtaaataatacccttataacttttttcctatatactttcgcaattataatacgcggtttgtctgtccgttgactgttgctatatgtagtatatagcagtacttatttatttattttatcagtacagtacttatttatttcagtgtacgaaagcggttgtttttattttcagatttaaatttgaattcaacctcgtcataatccccaatccaagaacaaagacaaaatttagaagggtacggagaacttaaagtctcacaaatccttttttaattccggatatccacaaattaaccggaagtaggactaattcctgaaaatattaaaatgtatttagtttagggaattaattttttctataaatatttttaatttaatacatatagatgtcgaaattatattaaacctctaattacaaacatataatgatattgagatatacatgattgatcaggagttaaaaatataaaaacaaaaaaagtgaatgaagaaaaaaaaaagaaaataaattgtgagtttaaatttttccagtgatattttaaaaaaataataataaattaatatttatcgtcgataatattagtatctcttactccccttgctctataggctcgaacttattatgattgatggttgtcattcatatgttccactaataaaaggagtaagattgacaaatgaataactagttaaggtgagtgcattaaatcagtaagatacaatactcgttataaattattaaatgaacgaatagtcaatgcttgactgttgacaacctttgaatagtcaatgttatctatttatccttagatggactttggcaacattgatgttaatccagagtggaatgtaaagttttaacgcatagcatgtctaaaatgatatgtatgtagtgtagaatctttatatgtgttatttttttttataaagatgaataatcaataataaagtttatgactgttttccattgatgttatgataaaattaaataaataaatccaaggcaatcacttcaaagacgttataattagacaatatcagcttcttcttctttttttctaaaaatgataaggataaataagtatgaattaatcataacagcacatctttttgtactaaaagatgattcattttaaaaaggtaagcattacgttacgaataaatttgttttcatgatattttgtttgtatgcaacatatttttcaatacaaaaatatttttatataattcaaactaaacataattttaaaattattttttagctaacacaataaaatttatataattaatttaaaaaataattgtgaacaaaataaatcagtaaataattttttcattataagatagcctaaaattattttttataagatttgtgtaaaaataatatataataaaagaaaatatgttaaaaactgagcaatgctattgggtacaaatagcataaacacaaaaccaaacgactagaaacgtgacttaatattatttttaaaaaatatatatattaattaacttttttcataaatataaaataggttttggtagaaatcacagttgatgcaaaaccaattcgtacaagacagcattttcctttaaaaaaattgtgtatatttgcctcagccacacgaaagcctaattaataagttatctcattttggaagtacgttgtatctacatgtgaacgtatttaaatgtaactaaatccatgtttaatgaaactttcggcgttgatctgacacatggt

SEQ ID NO: 50 - DNA, 3138 bp, Populus trichocarpa
aaaaaggaaattaactaatattatatatatagtgaattcttaaaaatacgtccctcaatatgataaacattgttatatcgatcgggaaatatagttttagtgttcctagtatttttaaaaagaggtgccttcgtccaactaatcaaaatacgagagtcaaactatgagagttacatataatttggtgtcagagtagaatggcatgaagttatggctgctaaactttagctgactgtctgtttcatagcctaatttagccaacacctcaagttcctctctcctgatggcatctgctgctatctctatcctcatagcttttaacccatatcacatgttttcaaggtaccagagaggcggtggcttgatctaagaaatttaatcttaccggtaatttgcaatttatttgcatagttgatttcaattaatattgatgtcatactataaccggacttactaaatatattaccagggtctaaaatgcataccaccatcaccaggaccggaattaagggccggctcctgcaatgaaattttttccagtatttttcatttaataaattagatttttagttttaaaaataaaaaataattttttttaatttgaccagctcaaaataaaattaatagcttcgccccttatcctcacctcgacatttgtctttgtaccagttaccaaagacatcacggcaggattcgaggctggtgaagagagaagattaaagaaaggtgtacctcaaggagggacgatgagtaaattaaatatatttattttggaatttttaaattcatgagcacacgaggcgcgacggctcttattaaatttttcgtacttaccatggagaaaaaaaaaacaaataaagtaataaatgtataagcgagacgtacctttttggttcctgcactacaactgtttttgaagcacaaaatattattttttttcctttcaacgtaaaacaccaattcctttaaaaggaaacaacttttcttcgaatataaaacaggggtttaaagcaacgcaactcgttgagattctttcaagtttgtgcagtgcagctcatgatggtagtcataacacaacagtcctggatccaactacatttataattaagttctctctttggttgaccagtgagaatcattgagaaatatcaaaacgagtttttaaaaaaatgaatatgaaaacaaatgctccgctttgacttttctttacttttccctgctttaatggataggggtatcaatttgtccagttgcagttgtggaagtaaaatacaattatgtaacattttagttgttttttaaaatgtttttaatttaaaaatatattaaaatattttttattttaaaaaaattatttttaatactaacatattacaaccagatacaaacatgaaaaatattcttaaacaattctttttaattttttaataaaatattatttgaaatacaatactgtaacattttagttgaaactctattttctctacaaggatgcatggatacttttttttttaactaattgagtgtataacagtaattataattttttaaaatattttttatttgaaaatatattaaaataatattttttattttttaataaattatctttgacatcattatattaaaacgatttaaaaaaataaaatttaataaatcagtgtttgaaatgcgtttaaatatctctttggcgcggtcagccatagctttccatgcattaaactacaggcgaggacatcagacgccagttgttatataatttttggacataaggtgacaaatcttaatttccccaccacatgcagtactattcttctttcctttcgatcttgtgctaattaactagtcacatgttttgcttaattaaattgaagtgtcaatttcattttcatgttaaattaatttgttgtcggttctatatataacaaaattatcccttctgtttgtaagtattgaattttttacaagatttatttatttaaatacaaattacttttatttgaaatcttttaattatatatattcctttgttattgaacatgaatccaacatagattcatgggaattaggtccacgagaatatattagcccctagctataaacgactgagaagatacattttactaacccccctctcctctagtggatgcgatcaggttcaagtaaaactgattacagtgatacaatttcaaatgcttctggatctttctcccctttcactcataattaatttttctaatccctcctttttcttattataaaatgtatatgtcatcaaatttgaaaatatgcatataccaaacatcattaaaaataactattttattttgtaatcattcctttgttgattttttagctcaaaacaaacaaattctaaacgtgattactacgattcaacttcaatacagatgttacttgaaattctgctagattacttaattaatagtttctagctaaattatccatatatatctcttgatttataatttctgattaataaaaacagtgatcatttgatttggagcacacaataacaaatatgctattgatgagtgaaaaaaaatagccgagagaaatataaacaaagttattaaatttggttctatttagaactccactagagattcaagtcaatcaaaaaaatgttattttaatttaataaaaataaaactaaattttaatcagttcattaattaattcattgaattactcatttgattagttgcaatctcaccaagttttttttttaaaatccgacacagcaataacaaaggatattggacagggaagggtactccgaacccgtacctggtaggatgtctagttacacccggagagaaaagaaaagaaaaggccagaaaaaattaatagatatattttttttttttggtgtaagaaaattaatagagttaagtgggcgttgagcgcctcattaatcttctcatctgcctccatcattgcccacggccccgtgcctttatatctcccatcctcccgcctccccccctcacctaatatcatcaactctctttctctcaagcaacaaccatacactcatctcttctcgtctccctctctctccccctcagtacactacattcctcaacatttcttcttcttcttcttcttggcaaaata

SEQ ID NO: 51 - DNA, 3000 bp, Populus trichocarpa
aaaaaggaaattaactaatattatatatatagtgaattcttaaaaatacgtccctcaatatgataaacattgttatatcgatcgggaaatatagttttagtgttcctagtatttttaaaaagaggtgccttcgtccaactaatcaaaatacgagagtcaaactatgagagttacatataatttggtgtcagagtagaatggcatgaagttatggctgctaaactttagctgactgtctgtttcatagcctaatttagccaacacctcaagttcctctctcctgatggcatctgctgctatctctatcctcatagcttttaacccatatcacatgttttcaaggtaccagagaggcggtggcttgatctaagaaatttaatcttaccggtaatttgcaatttatttgcatagttgatttcaattaatattgatgtcatactataaccggacttactaaatatattaccagggtctaaaatgcataccaccatcaccaggaccggaattaagggccggctcctgcaatgaaattttttccagtatttttcatttaataaattagatttttagttttaaaaataaaaaataattttttttaatttgaccagctcaaaataaaattaatagcttcgccccttatcctcacctcgacatttgtctttgtaccagttaccaaagacatcacggcaggattcgaggctggtgaagagagaagattaaagaaaggtgtacctcaaggagggacgatgagtaaattaaatatatttattttggaatttttaaattcatgagcacacgaggcgcgacggctcttattaaatttttcgtacttaccatggagaaaaaaaaaacaaataaagtaataaatgtataagcgagacgtacctttttggttcctgcactacaactgtttttgaagcacaaaatattattttttttcctttcaacgtaaaacaccaattcctttaaaaggaaacaacttttcttcgaatataaaacaggggtttaaagcaacgcaactcgttgagattctttcaagtttgtgcagtgcagctcatgatggtagtcataacacaacagtcctggatccaactacatttataattaagttctctctttggttgaccagtgagaatcattgagaaatatcaaaacgagtttttaaaaaaatgaatatgaaaacaaatgctccgctttgacttttctttacttttccctgctttaatggataggggtatcaatttgtccagttgcagttgtggaagtaaaatacaattatgtaacattttagttgttttttaaaatgtttttaatttaaaaatatattaaaatattttttattttaaaaaaattatttttaatactaacatattacaaccagatacaaacatgaaaaatattcttaaacaattctttttaattttttaataaaatattatttgaaatacaatactgtaacattttagttgaaactctattttctctacaaggatgcatggatacttttttttttaactaattgagtgtataacagtaattataattttttaaaatattttttatttgaaaatatattaaaataatattttttattttttaataaattatctttgacatcattatattaaaacgatttaaaaaaataaaatttaataaatcagtgtttgaaatgcgtttaaatatctctttggcgcggtcagccatagctttccatgcattaaactacaggcgaggacatcagacgccagttgttatataatttttggacataaggtgacaaatcttaatttccccaccacatgcagtactattcttctttcctttcgatcttgtgctaattaactagtcacatgttttgcttaattaaattgaagtgtcaatttcattttcatgttaaattaatttgttgtcggttctatatataacaaaattatcccttctgtttgtaagtattgaattttttacaagatttatttatttaaatacaaattacttttatttgaaatcttttaattatatatattcctttgttattgaacatgaatccaacatagattcatgggaattaggtccacgagaatatattagcccctagctataaacgactgagaagatacattttactaacccccctctcctctagtggatgcgatcaggttcaagtaaaactgattacagtgatacaatttcaaatgcttctggatctttctcccctttcactcataattaatttttctaatccctcctttttcttattataaaatgtatatgtcatcaaatttgaaaatatgcatataccaaacatcattaaaaataactattttattttgtaatcattcctttgttgattttttagctcaaaacaaacaaattctaaacgtgattactacgattcaacttcaatacagatgttacttgaaattctgctagattacttaattaatagtttctagctaaattatccatatatatctcttgatttataatttctgattaataaaaacagtgatcatttgatttggagcacacaataacaaatatgctattgatgagtgaaaaaaaatagccgagagaaatataaacaaagttattaaatttggttctatttagaactccactagagattcaagtcaatcaaaaaaatgttattttaatttaataaaaataaaactaaattttaatcagttcattaattaattcattgaattactcatttgattagttgcaatctcaccaagttttttttttaaaatccgacacagcaataacaaaggatattggacagggaagggtactccgaacccgtacctggtaggatgtctagttacacccggagagaaaagaaaagaaaaggccagaaaaaattaatagatatattttttttttttggtgtaagaaaattaatagagttaagtgggcgttgagcgcctcattaatcttctcatctgcctccatcattgcccacggccccgtgcctttatatctcccatcctcccgcct

SEQ ID NO: 52 - DNA, 2556 bp, Vitus vinifera
tttttaaaataattatttcaaaaaatatcaacagtgcaattattttttataataaaatttaacatatcatataaaaagctttctttttttaataaaaaattattaattagaaaattattttctgttttgaaattaaaaaaaataaaaaataaaaaaattccagaagagttttgaaacaggaccacatgttaaaggtaggtgcttaaattaaaaattgaatatgatatcgacggtggcagcaggtggagtctgagtgtgagtggggatggccgttggccacataaaattctcagagagttaggtttggttcccatgaaatgaaagtggcctttccatttaacattctacaaggtgtctccatttgcctttgccaccattaaatttagggtttctgggttcatcttctgtccatttcagatgaatgcactctcctctctcccccgtatatcccctctgcacttccatcttaaatgccatattttgtggttcaaaacttgacccccattcatactccaccttcatgtcttgatgctttcttatttttgcactccaaaagaagggaaaaaagagagaagtatgaaacaaaaacgaggcataacatgatcacttcattatataattacccatcaaatatatatttactaaaattacaaatgtcaataacaaaatattagatcgataactgttttcaaaaacagtttttgaaaatagtctttaaaaattattatttcatgtttttataaaataaaattttatttaaaaacttaaaatgtttttaacttgtttttagtatctttaaatatattttaaaaataatttttatatgcctttgtcatttcattttgatgttaatttttatatttgaaaattgttttaattattaattttaatttaatgaaagctcagcccaatctaaaccagcaagatggttgatgatagataataattaataatatataccccaaatcagaataaatctgctagccgttaccctcaaatatttgaagtatccctatacattttggtgatgcaacttgttgtgttgattaggtttttagtatacatggtttaagagaaacaatccttaattagtttatactaaatgatgttatagacactaagtccaccttatgttagaagtactagttttagattagcttaactcaaatgttttatttcaaaagattagagtatgattaagaatgttttttgaaaaactattttataaaatagtttttttaaatagaattttatttgagaatttgaaatatactccgacttgtttttatgtatttttaaatattttttaaaattaatttttatttattatgctttatttttcatcattttttgtatttgtattgttaaaacaatttctagaacaagtaaaaataattaaaatatgtcatttaaaatcattatattttcacaataagttttccaaatattatttttattaaaaaataaaaataataattttttgctcgtaagtacatttgtttttgtgttttttttttcttcaaagaactctttatcatagtatcatgtaagaggtatcattacgttttttttccaagcactcaatgctaacaataccaaaatgtttactaaaaatgtaattttatttgttttttgttttaaaaaatagaaaattattttaaaaagtaattacaaaaaacctatttgacaactatttttaaaaacaattctgaaacttatttttgtataacaaaactctataatatttttaatattcttatatatgttttaaaaataatttttatatctagtatttaaaacaattctaaaaataataataaaaaaaaattaaaattttttttattttttgcttttaataataaaaaacaaaaaataatttttaatggtttagtttgtttttattatgaataatagaaaattattttaaaaaccaattctcagtacaaaatggcccggaatgttcggattgcgttgtacaaaacccatgatacaatcactttctagtttgtagaggtgggatgaggctattaattgcttgggagtgtcattgaaaggatggatcttggcttatgaaatttcaccactttggaagaaaaacaatgaactgatgaattaatttaagtcccaaatcaattaattaaggatgaatattttgaatttacaaggaagggtgctatttttttattagaccaaagtagaaaaatgaacaaataacagtaacccattaaagaggggcatcatgaatatgaaaatgaaaatgaaagagaaaaagagaaacaaggggggagtttagttgattaataatgagggaggttaggaaataaagtgtaggtgagtccaggtgggggagcgttgcgtgagtgtgagctgttcattaaatcctctcatctgccctctatttaattcccactattttagctttgcctttaaatcccacctcaccctcccattttctccctaccactctcttttctctcttctttcatcaacatcatcagctctttctctttctctctttctgtctttctccctcaattcttaattctcactcccaaa

SEQ ID NO: 53 - DNA, 2500 bp, Vitus vinifera
tttttaaaataattatttcaaaaaatatcaacagtgcaattattttttataataaaatttaacatatcatataaaaagctttctttttttaataaaaaattattaattagaaaattattttctgttttgaaattaaaaaaaataaaaaataaaaaaattccagaagagttttgaaacaggaccacatgttaaaggtaggtgcttaaattaaaaattgaatatgatatcgacggtggcagcaggtggagtctgagtgtgagtggggatggccgttggccacataaaattctcagagagttaggtttggttcccatgaaatgaaagtggcctttccatttaacattctacaaggtgtctccatttgcctttgccaccattaaatttagggtttctgggttcatcttctgtccatttcagatgaatgcactctcctctctcccccgtatatcccctctgcacttccatcttaaatgccatattttgtggttcaaaacttgacccccattcatactccaccttcatgtcttgatgctttcttatttttgcactccaaaagaagggaaaaaagagagaagtatgaaacaaaaacgaggcataacatgatcacttcattatataattacccatcaaatatatatttactaaaattacaaatgtcaataacaaaatattagatcgataactgttttcaaaaacagtttttgaaaatagtctttaaaaattattatttcatgtttttataaaataaaattttatttaaaaacttaaaatgtttttaacttgtttttagtatctttaaatatattttaaaaataatttttatatgcctttgtcatttcattttgatgttaatttttatatttgaaaattgttttaattattaattttaatttaatgaaagctcagcccaatctaaaccagcaagatggttgatgatagataataattaataatatataccccaaatcagaataaatctgctagccgttaccctcaaatatttgaagtatccctatacattttggtgatgcaacttgttgtgttgattaggtttttagtatacatggtttaagagaaacaatccttaattagtttatactaaatgatgttatagacactaagtccaccttatgttagaagtactagttttagattagcttaactcaaatgttttatttcaaaagattagagtatgattaagaatgttttttgaaaaactattttataaaatagtttttttaaatagaattttatttgagaatttgaaatatactccgacttgtttttatgtatttttaaatattttttaaaattaatttttatttattatgctttatttttcatcattttttgtatttgtattgttaaaacaatttctagaacaagtaaaaataattaaaatatgtcatttaaaatcattatattttcacaataagttttccaaatattatttttattaaaaaataaaaataataattttttgctcgtaagtacatttgtttttgtgttttttttttcttcaaagaactctttatcatagtatcatgtaagaggtatcattacgttttttttccaagcactcaatgctaacaataccaaaatgtttactaaaaatgtaattttatttgttttttgttttaaaaaatagaaaattattttaaaaagtaattacaaaaaacctatttgacaactatttttaaaaacaattctgaaacttatttttgtataacaaaactctataatatttttaatattcttatatatgttttaaaaataatttttatatctagtatttaaaacaattctaaaaataataataaaaaaaaattaaaattttttttattttttgcttttaataataaaaaacaaaaaataatttttaatggtttagtttgtttttattatgaataatagaaaattattttaaaaaccaattctcagtacaaaatggcccggaatgttcggattgcgttgtacaaaacccatgatacaatcactttctagtttgtagaggtgggatgaggctattaattgcttgggagtgtcattgaaaggatggatcttggcttatgaaatttcaccactttggaagaaaaacaatgaactgatgaattaatttaagtcccaaatcaattaattaaggatgaatattttgaatttacaaggaagggtgctatttttttattagaccaaagtagaaaaatgaacaaataacagtaacccattaaagaggggcatcatgaatatgaaaatgaaaatgaaagagaaaaagagaaacaaggggggagtttagttgattaataatgagggaggttaggaaataaagtgtaggtgagtccaggtgggggagcgttgcgtgagtgtgagctgttcattaaatcctctcatctgccctctatttaattcccactattttagctttgcctttaaatcccacctcaccctcccattttctccctaccactctcttttctctcttctttcatcaacatcatcagct

SEQ ID NO: 54 - DNA, 3000 bp, Sorghum bicolor
tatccccttgatgacgacgagcgttgagcgtgcgtggcagtgattgtctgattgactgatcgagcaagtgtgtatagtagccaactctctctgcatgtggtggcttgcaggacgcacacaactattatagaggccggccgcgcatatatataggtatataggatcagtcaatcagacaatcactaaagatacattgacatgtttgtgtttttcctagaaaatcatttcaaaattttcaaaggaaagccttttaagacaaactagaagttatttattttgatctatatgtatttttactcctacataagaggctacctttatcttccacataaaattttagaagataactttgacatcatggacaagttcgaatagacccatgacggctaatgtgtgatgtgagtctcaccttgggtcttgagagttggttagaccaacatactcccttcatcctaatctataagtcactctaagaatcttgtcaaaacatctcaagtaactaacattatagaaaaaatcaaaaagatttatgacatcaaataaatattactataaaaatataactaatgaagaatctaatgatacttagatgatatcataaatgttattatgttatcatataaatttggtcaaacttaagatacttttgactttctaagattcttggaatgacttataatttaggatggaaggagtatacggcttctagagtccttatcatcaacaccatgctagaccttttacgtgaggggaggatgaaagcataagtgggttgataggactgtggttcgcttagtgtatggtgtgaacccgatagactctagaaacttgtgtatcaatggtcaattatgagtagaaggttccatcggaacaattattatttatttcaagctatttcggctctttcttaatcttcaaaaagaaattaattccgtaatggtaagacgaaaaaagaaaaaaaaataaaaaggaagtgtggaaaaatgacaaaatggcggcacagggaggcgagaaccaccgcttttaggaaataagcctacaatttgattctcgtctcgttttacttgcattttctttcgttcagtctcgttctgagagtggaatcgaaccactcactccgtttggatttagagtccaaagggcccagccagcgaaagaggattgacctccgtggacatgtggtgcatggtacgtgttggcccaatcaatgtagcttgtgacatggcactgcgccattactagatgcatgcacgtgtgtttcaagagggaacattttttgtgaaatgtggttgtattcacatcaatccatgtgtattagggtggattgaagtggaagttgaactaaattttacctcaatccaccgcaacccatgtggattgaggcgaatccaacaacattcaaataaggccttacttggttatgggtgtgttggggagacgttgacatgaggccctttgagatggttgcaacctgggtcaatttaacttaggccatggtggatcatgtgtatgttgaggtgagatcgtgcaggtttggtctcaccttgatcactgagggtggatatagcacatataatgtttttaatctacatcattaactctaggttggcccttttatgtaaagcaaggatgaaagcataaataggttagtgaaagtgtgcgcttaactaagagtgtagagtggatctgagatattgaactctaagcactaaataaccaagttttaacttatgtcaatgttaatttgttagtataaacaataagaatataataagcatataaatattgtaatacaacttaccaccaataactttagtactctactgcaaagtataaagacgttttggcttttctagatatatagtttggttgtgcacttacatatattttatgtctagatatatacatattagaatgtatctagaaaagacaaactatcttacaatttagagtgaagagagtatatatagagatgtaatgatcatcttgcatcattgaaatactatatgacatcaaattattacaaaaacaaaaatatcattggttgaagcttgttgaagatcataaattattatttttgagccctcataaggtacaactgccgtttctaaacatatgcacaaacacaaacactcacgcacgcatacaacacacacccagtgtgcacgacctacaaactatacacacgtagatacgaaccatgttacggtcgacgcggacatgaactgggccttcatgaggggcagcactagatatcactgagtgatctcactgagtccaccccttccccctcctcctgatggcatccttggaccggaaaccatgtcagggctctccgatctttgcttcaaccatggcgtcaagtttgaagcactcgtctcacagcgttttggatgcccagtgagtcccatctctccccagactgttttggatctttgcttcaaccatggcgtcaagttttggatctctccccagcattttggatgcccggtccgctgtccgtctgaatattgattcagtgagtctcatccttcaagcttgctttggtggcaaagaatacaatgttacccatctctctggatggatgttcaaattttcaatatcttgcaaaaatgtggctttcatgattaacaaccttaaaagccactctttcaaaacttttctcatcttctttcacctttggagtggaggaggaccaaattggcgcaaggattttactctctggcaacaggagcaagatgcaaaatggaaccttgttggatccaagtccaagaaatcttatgctgatattgctaaatcaaatatcaaaaaatcagttttgttgcgcttatcttaccccaccaattatgcatccaacttcctggagccccctcgcagagcatctttggctcctgacaggttctcccatcgccctgctcaaaataatgtgatgaaagcacaaattgatagtaaacctgtcaaaggtttgcaacaatctcatcctagtggctttccaagatg

SEQ ID NO: 55 - DNA, 3070 bp, Zea mays
cgggcggagcggagttcgccgtcttccggggcctagcccaagtccgagccctgggtcgggcggaacggagttcgccgtcttccggggcttagcccgagtccgagccctgggtcgggcggagcggagttcgccgtcttccggggcttagcccgagtccgagccctgggtcgggcggaacgaagttcgccgtcttccggggcttagcccgagtccgagccctgagtcgggcggagcggagtttcctatggcgcctttggcaaggcctgactgcctgtcagactcactctgtcgagtggcactgcagtcggagtggcgcaggcggcgctgtccttctgtcagaccggtcagtggagcagcgaagtgacggcggtcacttcggctctgccggggggcgcgcgtcaggataaaggtgtcaggccacctttgcgttaaatgctcctgcgactcggtcggtcggtgcggcgatttagtcatggttgcttctcagcgaaggcaaggcctcgggcgagccggagatatgtccgccgttaaaggggggtctcgggcgagacggaaatctctcggggtcggctgcccttgtccgaggctaggctcgggcgaggcgtgatcaagtcgctcgtatggactgatccctgacttaatcgcacccatcaggcctctgcagctttatgctgatgggggttaccagctgagaattaggcgtcttgagggtacccctaattatggtccccgacaataagtatcactgagattattaaattatatttttggattgagggagtagtatttaaagaagagccttgcatgcaatttcttttgtttgaataatgttttcaacttaaatacttttttttgcatgtgtaacatttattctccataatatttttccatgtatctaacttataaatcattttcataaaccaatgtcaaagatgaatccatgtttcttacttggaaaccccgaacaaacaccactagcacgaggcgctcgcgttagcgtcgctcaccgacgacgagaagaaacttggcgactgtcagttcgaactctggaagcagtcctacatggcccatgcgccgctgtgtacggcaagctccggcgcagctgccgcttggacgtggtccagagcggctgcaccgcgctgtccatcgtcaaacatggggacctcatggtcgtcgccaatgtcgacgactctcgggttgttctgggcatcgcaacctacgacgacgccatcacgccgtctagctcatcatccacctgaagcctaacctgccacgtaagtcgctactgaccgaccatgaattcttgtgcgctggaatgatgaccattgttgttgttgtgtgagtgtcctcgaacaagatgtatgtagaggagtagcacatccggtggtgcaacgaccaggtgtactacctcgctgatgagcccggggtgcacttcatttggcagcccagccaagagtgatcggtactcaccatatcgcgcgcgttcgacgactattatatcaaggattgtggcgtcatctcgacaccggaggtgagcagaggtggaccgacaacaatgaccactcgccatcgtcggggtaccttttgtgtcggcctgcctttaattctcttcgcaaacacacacttgtattttttgtttaagcaagcgtgtatggtggtgcgtgcctgatgactaacgatgtacgacggaacttctaccggcaggtgtggcacgtgctctccaataatgagaccatgcaaatcatgacatatatcgaagtgtgcatgatactgatagttgcaatgtagtagtgaaacaactaaattaaaataacaaaatttatgtatggctaggatcacaaatgaattatgaaatattttcttataacaatataagacacattttgtatataagttatcatggtattatatgttcccgttgcaacgcacgggtactgacctattgttcattaaggatctttaatagatgttttttgttattttctcgaacctaaatgttcgtcgaccaaacttgttttgtatcagtgtataatattattgtcactgttttttatgtcgcggactatgttttttgtacgtcattgaaactacctataaaattgtcactgtgtatcagcgtatgtgtatgcagttggcttgatgtgagacaataagctgaacccacggggttttcatggttttccacccaattacgagttggtttgcggtcaataatattattggatgggttgggtttattttttttcttatattttagggtgggtgtgggataaatatcaaagttattatacttgggtatgaatgggagtgagttggattttttgccattagcaggcctacatggcggcaaacacacccccatgtctttatccccatttcatacaagtcaggtaattaacgagtatccgctgacatgagactgttttgagttttgacgctttcataccggcctgatgatgataccttggcagttggcaaacggcccatcgatgtccgccattaactgccgatccaatccaagtaaccgtaggtatctttctgaccatagtccacaagtccaaaccagccgtcaaaccaaccgatcatggacatccgatgggcatgcttgttgcgcgatcaaaagtcatcatacaaaaaatgtgatgaataaaaactggacaaaatttgtgccatcgaatggagcatacagtcgtggggggcctgctacaagaccaggcgccaaccccctgcctctgggctctggttggtggcggtagccgggctctcatttaaactacccatctgcccccgattcttttaattacgggcgaccctcgcggctccgcccctattttaagaccccaccacggcaccacctcctccgcaaacaacacacgaacaccgcaccgcaacgtagccggctaggggaagagctctttccttcagctgtgccgtgcacaacgcacggcacgctggtttggtttgcatcgcccccgccaagacgctgccgtgagcaggcagagcgggtgggaagactggtgggcgagccggccgcgccgagggatagcagcagcagcagcaggcgggcgac

SEQ ID NO: 56 - DNA, 2719 bp, Setaria italica
aaagcaaagattcatgcctgagctgttggtgacgctatcagctttggctcacctaaaagcagcgccggccacagctggggttcgtttcgtctactctgattctcttctgaagtctgaagtccaaaccatggccaaagtgactgttgacgcaggcacgtaaatattcaattgtcacagtgcggtttggacaccacgtagacaaacgtttcctggtcctgagcttttgattggcccatttcagactagtacgttaatgcttgcactggcccgaagcggaccacattgctactgtgtgtttatctgctccgagaaattgggagatagggtggttagtacagatgagcagctgttcgctttctccatctatcattcttcagcacctgcacttccaaaaagctttgaatttggcttaggtcatggaacggcttttgtcaggatctcaacgttctcctttatttgcgagctcaactccttcctcatagctaactcttcgttcagtcctccagcattgccctctgaagtctgaaccactccatttctatattgtacaaggaaaaggagtgctatatcagggttgcatttccaaatctgcaaagcacgcgtacttgaagccatcaaaagatgactggccagcaggagcagcttgccagtgacacagatttcgtccaaacggagcacgcagcgcatcgtgctacagcgaatcgatcggatcgagctgaggccaagcattcaaggttttgcaggtgcattgtgatgccgacccgacacacgcgactgctgcagtggctccatctataaatctgtcctatataccagcacgcgtgaacagacaaaaaaaaacatcaacaacaagaagagaagttttactgctgcttccagaaaccagcctgatcatgagtttttggctttgagaacgagctgaggatggttttccagggcaggtgaacgacatctcgccatttctcaatcctctaacctctccagatgaggggaaacagttcagtgctttgcctgtgcattgtgcgagaatcgggcgggagcgttcatcttgatccagcacagcagggctttaattgtgcaagcagaaggtaccagtaccagcagaggattgatttgcacatgtggaagctctgaagccgttgctatcgcatcgttctgacccggtttggtggcacgagcaaggtagccaaatcaggccagccattgcatgtgttgccgtacatgcacaagaaagtttaaccgcagtcatatgaagtactactgacccggatgtactacatgactgcagactgtgatgcttgctagaggtaaaaggacacggagggcaggagtcctgccagttccctcaatgctctgtgctccgatctctctagaagggacccccttctttttatttttgaaactatagaaagacaaatttcccttccccttattagattgtactaagtactattttgattacttgtttttatgaattgtgcagaggctgagaggcctgatccaactttgggtgcggccacaatgtgtgggaaatatgcgctgtgttcatctgcacctctctgccccctttatctcaagcaaacgtctgtaccttgattatgtacttggtatgattggtgtgagattcagatgcaacgattacttcatatgagccttgctcatcaccgattttccctcccttctctcgtgcctttttccttttcccaaaccactgaagctcaaccagtccgcatcagttcactactcccgctagcatggcaacggcatgatcatgaaggattccaacaaatggcctggcagctgatggaattcgactgctctctctgaaatttagctactccttttttcatcaattgagttttgacgataacaatttggagtggcgcaattcacaaccacaaccaacacttgtctccctctccctggacggaacagtgcggccttgctaatgctaccaacaacacggtgcgcggtcgtacccttggccgttggcaaatggccgatcgacatcgccattaactgccggtccaagctgcgccaggcaagccgcgaaagccgtagagtaccttcccgttcctgcccaccaacggcttcctccgcgcaccgggacgacaacctgatcgacccatccccaccacttgatcgtcgcacaccgatcctcgcgtgcgctacagttcgtcacgcacccgtacgttcaaccgtcgtctcctcacccctcgctaaatcctcgctgttttcccgaaattgcttaccaaaaccccgtgcgcgcgcgtgcccgaagctgcagtgctgcaggcggatgcgagcgccggagcaccggagccggaggcaggcaggcccccgcccccagtggccaacccctaactcctccggttggtggcggtagccgggctctcatttaaactacccatctgccccggatttaattacgggcgccccctttcccggctcgcccactatattaagaccccaccacggcaccacgtctcctccgcaaacaaacaccccaactcgccaggccaacgtacccccacacaaaacaccgcgacgcagcgccccggttctccctagcttcccactgcgcccaacgcacggcacgcggttgcagcagcgtccgcgagttccctgcggagagcagaggccagaggcgagcggcagggagggagagtgatcgatcgactagtgaagtgagccgcgccgcgcgagggcggggggcgcc

SEQ ID NO: 57 - DNA, 2500 bp, Setaria italica
aaagcaaagattcatgcctgagctgttggtgacgctatcagctttggctcacctaaaagcagcgccggccacagctggggttcgtttcgtctactctgattctcttctgaagtctgaagtccaaaccatggccaaagtgactgttgacgcaggcacgtaaatattcaattgtcacagtgcggtttggacaccacgtagacaaacgtttcctggtcctgagcttttgattggcccatttcagactagtacgttaatgcttgcactggcccgaagcggaccacattgctactgtgtgtttatctgctccgagaaattgggagatagggtggttagtacagatgagcagctgttcgctttctccatctatcattcttcagcacctgcacttccaaaaagctttgaatttggcttaggtcatggaacggcttttgtcaggatctcaacgttctcctttatttgcgagctcaactccttcctcatagctaactcttcgttcagtcctccagcattgccctctgaagtctgaaccactccatttctatattgtacaaggaaaaggagtgctatatcagggttgcatttccaaatctgcaaagcacgcgtacttgaagccatcaaaagatgactggccagcaggagcagcttgccagtgacacagatttcgtccaaacggagcacgcagcgcatcgtgctacagcgaatcgatcggatcgagctgaggccaagcattcaaggttttgcaggtgcattgtgatgccgacccgacacacgcgactgctgcagtggctccatctataaatctgtcctatataccagcacgcgtgaacagacaaaaaaaaacatcaacaacaagaagagaagttttactgctgcttccagaaaccagcctgatcatgagtttttggctttgagaacgagctgaggatggttttccagggcaggtgaacgacatctcgccatttctcaatcctctaacctctccagatgaggggaaacagttcagtgctttgcctgtgcattgtgcgagaatcgggcgggagcgttcatcttgatccagcacagcagggctttaattgtgcaagcagaaggtaccagtaccagcagaggattgatttgcacatgtggaagctctgaagccgttgctatcgcatcgttctgacccggtttggtggcacgagcaaggtagccaaatcaggccagccattgcatgtgttgccgtacatgcacaagaaagtttaaccgcagtcatatgaagtactactgacccggatgtactacatgactgcagactgtgatgcttgctagaggtaaaaggacacggagggcaggagtcctgccagttccctcaatgctctgtgctccgatctctctagaagggacccccttctttttatttttgaaactatagaaagacaaatttcccttccccttattagattgtactaagtactattttgattacttgtttttatgaattgtgcagaggctgagaggcctgatccaactttgggtgcggccacaatgtgtgggaaatatgcgctgtgttcatctgcacctctctgccccctttatctcaagcaaacgtctgtaccttgattatgtacttggtatgattggtgtgagattcagatgcaacgattacttcatatgagccttgctcatcaccgattttccctcccttctctcgtgcctttttccttttcccaaaccactgaagctcaaccagtccgcatcagttcactactcccgctagcatggcaacggcatgatcatgaaggattccaacaaatggcctggcagctgatggaattcgactgctctctctgaaatttagctactccttttttcatcaattgagttttgacgataacaatttggagtggcgcaattcacaaccacaaccaacacttgtctccctctccctggacggaacagtgcggccttgctaatgctaccaacaacacggtgcgcggtcgtacccttggccgttggcaaatggccgatcgacatcgccattaactgccggtccaagctgcgccaggcaagccgcgaaagccgtagagtaccttcccgttcctgcccaccaacggcttcctccgcgcaccgggacgacaacctgatcgacccatccccaccacttgatcgtcgcacaccgatcctcgcgtgcgctacagttcgtcacgcacccgtacgttcaaccgtcgtctcctcacccctcgctaaatcctcgctgttttcccgaaattgcttaccaaaaccccgtgcgcgcgcgtgcccgaagctgcagtgctgcaggcggatgcgagcgccggagcaccggagccggaggcaggcaggcccccgcccccagtggccaacccctaactcctccggttggtggcggtagccgggctctcatttaaactacccatctgccccggatttaattacgggcgccccctttcccggctcgcccactatattaagaccccaccacggcaccacgtctcctccgcaaaca

SEQ ID NO: 58 - DNA, 2754 bp, Oryza sativa
ggcaggatgtactcacgtacagttagagcattaacttaggcaagcgtttttctttgcaggtaatggcctctgtcaaacctaatacagattggcagtttggcgcgatggacaggtcatgatcaattttaaataagcagatgatcacatttaatgtgtagtatgaagggaacaggtagaataatacttgtaagtttacaatcctgtcccacgaagatgtcgatcccctaagtgccgttcgtcgtagtacatgagggacaggtccaaaacgaagagacggaattcgctcgtgcgaaacaagggcaagagagacgtgaaccgaacaggattgcccttgcacacctgcggcggatgtatggttgcagctaagctttattaatgtgagtctctgcccttcctctggtcgatcgatgacgagcaaacacagcgcgtttcgccacgctttctcccaacccccaactccatcccatgtcggcccatcgtccattcgtcctccagaccgatcacatattcagacccgtcaacttcagcatttcacgcggccactacgacagctgcttcggctgcactttcactcgtatcagcgcgaggggaagaagaacaatccgtggttttccgtttcttcagaggcatggacagatcgtctcacgactcgtacgcgaagatgcttgatgcttcccggaggatcctgtctcgaattttgattggatcactgcgcactggacactcactactacgttaatgctgctgccagggctgcagccaaaggaccacactgtcattggctccgggacaataggaggccatatatttagccattttttagggagattttcaccaattgtacagttgcactattgctacgcagatcactgcatacgcaattaactctttcttacaagctcagaagctgtctgcacctatatagctactccctcctccgttctataaaaaaccaacctactatcggatgtgacacatcctaatactatgaatctggatatacatcatactaaaatatgttatatccggttctagattcgtttttatggaacggagggagtattctgtcatcagctatcactgctctgcctgaacttgtctgagctattactactgtagtatatgaatttatgaagtggagtctcgtaacaaaaatacgagtatactccgtactgtactacccttatcaggattcaaggatactaggagtatagcattaccagatcaggcacttagatgtggccatccaaagagtaatggtaatagcctaataggagtaccatctactattgatctttcaaaaaaaaaagtactagtatagaagtagtatccagctagagctgcttaacagggtcagaatttgtccaaacagagcttgtaatgcacactgacgaagtcgatccgatcgaatcagagtcaacatttaaagagtactatttcgaagtaaaactgttcagttcttacaagattacatgtgaatttgcaagacttggacatgagtgttcatctcgtagtttaatgatgggtacccaacctgcaacaacagtgctttaaattgtacaagcagagggtaccaacagagtaatttgcacatgcagtcctgaacctgatgccattgcgaaacacacaaccctatacggtgcagatgcaagggagcccaattcagtcccagccattatctgtattgccgtacttccgcagggaaagttaccctctcatctgatctaccattgcatacatctcaaaaggaagtgagtaaaaaagaaaacaggaccaatcttcagagataagtttttgaaacctatcttcagagataagttcactcggcgataggagaggacctgatttggactcaaatcaggtgttgacgaatagagtagcaagagttttttcgacgggtcaagacctcaagggtcttaacagttgaactaactcggttatgatttggacacttggtgattaactactgataatagtactacttattgttattggcttgttacatcattcggtgctcaaaaatcagatgcaaatttagatgggacagacagcagctactagcaacataagagaattatgttcagtgtatcatgcatgactaaactctgaacgtactcacctggatccagatgcgagcagtacagtacctgtgcacattgcttgtgtattactccacttaattacgaactctattattttcctccgataatgcccgcagaacaaggttgtcactgaaaaatggtcctctccagagtccaggagctataggaggagtatgatactccttagcaatcatatactcatatgacatatccaaattgacaccggggttaagccgttaaccgtcactacgagttgcacttgtataaacaaaaaacaagggagaaaaccttgtgtcccccccatgatgcagaaatctaataagagcagcccaacgcttccggttggtggcggtagaccggcctctttaaactaccccatccgccccagatttatcaattactcctcgtcatctcgtctcgtctccgccaccgtgcgcgcgtcccctatattagaccccccaaccgggcaccggacacaccatcaccaacacaccactgcaaacccatccgcctccgcaccgcatcgcacctacaaattgtgcacgctgcaccgctcaaaaaaaagaagaaactaaagtcgtacgtaggacgcggcgtgcgagcgttggtgcggtgcgcggcggcgcgcggggaagtagtgagagcatcgatc

SEQ ID NO: 59 - DNA, 2500 bp, Oryza sativa
ggcaggatgtactcacgtacagttagagcattaacttaggcaagcgtttttctttgcaggtaatggcctctgtcaaacctaatacagattggcagtttggcgcgatggacaggtcatgatcaattttaaataagcagatgatcacatttaatgtgtagtatgaagggaacaggtagaataatacttgtaagtttacaatcctgtcccacgaagatgtcgatcccctaagtgccgttcgtcgtagtacatgagggacaggtccaaaacgaagagacggaattcgctcgtgcgaaacaagggcaagagagacgtgaaccgaacaggattgcccttgcacacctgcggcggatgtatggttgcagctaagctttattaatgtgagtctctgcccttcctctggtcgatcgatgacgagcaaacacagcgcgtttcgccacgctttctcccaacccccaactccatcccatgtcggcccatcgtccattcgtcctccagaccgatcacatattcagacccgtcaacttcagcatttcacgcggccactacgacagctgcttcggctgcactttcactcgtatcagcgcgaggggaagaagaacaatccgtggttttccgtttcttcagaggcatggacagatcgtctcacgactcgtacgcgaagatgcttgatgcttcccggaggatcctgtctcgaattttgattggatcactgcgcactggacactcactactacgttaatgctgctgccagggctgcagccaaaggaccacactgtcattggctccgggacaataggaggccatatatttagccattttttagggagattttcaccaattgtacagttgcactattgctacgcagatcactgcatacgcaattaactctttcttacaagctcagaagctgtctgcacctatatagctactccctcctccgttctataaaaaaccaacctactatcggatgtgacacatcctaatactatgaatctggatatacatcatactaaaatatgttatatccggttctagattcgtttttatggaacggagggagtattctgtcatcagctatcactgctctgcctgaacttgtctgagctattactactgtagtatatgaatttatgaagtggagtctcgtaacaaaaatacgagtatactccgtactgtactacccttatcaggattcaaggatactaggagtatagcattaccagatcaggcacttagatgtggccatccaaagagtaatggtaatagcctaataggagtaccatctactattgatctttcaaaaaaaaaagtactagtatagaagtagtatccagctagagctgcttaacagggtcagaatttgtccaaacagagcttgtaatgcacactgacgaagtcgatccgatcgaatcagagtcaacatttaaagagtactatttcgaagtaaaactgttcagttcttacaagattacatgtgaatttgcaagacttggacatgagtgttcatctcgtagtttaatgatgggtacccaacctgcaacaacagtgctttaaattgtacaagcagagggtaccaacagagtaatttgcacatgcagtcctgaacctgatgccattgcgaaacacacaaccctatacggtgcagatgcaagggagcccaattcagtcccagccattatctgtattgccgtacttccgcagggaaagttaccctctcatctgatctaccattgcatacatctcaaaaggaagtgagtaaaaaagaaaacaggaccaatcttcagagataagtttttgaaacctatcttcagagataagttcactcggcgataggagaggacctgatttggactcaaatcaggtgttgacgaatagagtagcaagagttttttcgacgggtcaagacctcaagggtcttaacagttgaactaactcggttatgatttggacacttggtgattaactactgataatagtactacttattgttattggcttgttacatcattcggtgctcaaaaatcagatgcaaatttagatgggacagacagcagctactagcaacataagagaattatgttcagtgtatcatgcatgactaaactctgaacgtactcacctggatccagatgcgagcagtacagtacctgtgcacattgcttgtgtattactccacttaattacgaactctattattttcctccgataatgcccgcagaacaaggttgtcactgaaaaatggtcctctccagagtccaggagctataggaggagtatgatactccttagcaatcatatactcatatgacatatccaaattgacaccggggttaagccgttaaccgtcactacgagttgcacttgtataaacaaaaaacaagggagaaaaccttgtgtcccccccatgatgcagaaatctaataagagcagcccaacgcttccggttggtggcggtagaccggcctctttaaactaccccatccgccccagatttatcaat

SEQ ID NO: 60 - DNA, 879 bp, Arabidopsis thaliana
atggagcctcctcagcaccaacatcaccaccatcaggccgatcaagagtccgggaacaacaacaacaacaagtccggttccggagggtacacttgcagacagacctccaccagatggacacctaccactgagcagatcaagatcctgaaggagttgtactacaacaatgccatccgctcccctactgctgatcagattcagaagatcaccgctcgcctgcgtcaattcggtaagatcgagggtaagaacgtcttctactggttccagaaccacaaggctcgtgagaggcagaagaagcgtttcaacgggactaacatgaccactccttcctcatcacccaattctgttatgatggccgccaacgaccactaccatcctttgcttcatcaccaccacggagttcctatgcaaagacccgcaaactccgtcaacgtgaagttgaaccaggaccatcacctctaccaccacaacaagccctacccctctttcaacaacgggaatctcaaccatgcctcctctggaaccgaatgtggagttgtcaacgcctccaacggctacatgtcttcccacgtgtacggctctatggagcaagattgctccatgaactacaacaacgttggaggcggatgggcaaacatggatcaccactactcctccgctccctacaacttcttcgatagggctaaacctctcttcggcttggagggacaccaagaagaagaggaatgcggaggtgatgcttacttggaacacagaaggactctccctctctttccaatgcacggtgaggaccacatcaacggaggatctggcgctatctggaagtatggacagtccgaggtcagaccatgcgcttccctggaattgagactgaactag

SEQ ID NO: 61 - protein, 292 aa, Arabidopsis thaliana
MEPPQHQHHHHQADQESGNNNNNKSGSGGYTCRQTSTRWTPTTEQIKILKELYYNNAIRSPTADQIQKITARLRQFGKIEGKNVFYWFQNHKARERQKKRFNGTNMTTPSSSPNSVMMAANDHYHPLLHHHHGVPMQRPANSVNVKLNQDHHLYHHNKPYPSFNNGNLNHASSGTECGVVNASNGYMSSHVYGSMEQDCSMNYNNVGGGWANMDHHYSSAPYNFFDRAKPLFGLEGHQEEEECGGDAYLEHRRTLPLFPMHGEDHINGGSGAIWKYGQSEVRPCASLELRLN

SEQ ID NO: 62 - DNA, 876 bp, Lotus japonicus
atggaacaaccacctcaacaacaacaacagaatgaggatggtggtgggagtagtggtggaaaaggggggtttctgagcaggcaaagcagtacacggtggactcccaccacagaccagataagaatattgaaggagctttactacaacaatggaataagatccccgagtgcagagcagattcagaggatctctgctcggctgagacagtacggcaagattgaaggcaagaatgtcttttactggttccagaaccacaaagctagagagaggcagaagaaaaggttcacttctgaaactcatcttcttcccaatcccatacaacaacaacaaagaaatggaactaatgctgcttggaagcaacctgaagaacaacccattattaaccacaccaagtattctagtaacaacatttcagctcctgcagggatcatcacttctgctccatcttcttctgcagagattgtttctgttggccagataggaaactttggttatggatctttgcctatggaaaagagttttagggactgctcaatatctgctggaggcaacacaggctatgctggaagtgctataaaccacaacctgggatggatgggtgtggatccatattcctcagcctacaccaatttctttgacaaaataaggccaactgaagaagaaaccatggaagaagaaggacaagagaatggttcaccagagattgaaacccttcctttattcccgatgcatggtgaggacattcatagtggctatttcaacctcaagtctaattcttctcactatgctggtggctggtaccagactgaagaagggtacttcaacaatggttctcgtgcttccttggagctcagcctcaaatatcctgattttgct

SEQ ID NO: 63 - protein, 292 aa, Lotus japonicus
MEQPPQQQQQNEDGGGSSGGKGGFLSRQSSTRWTPTTDQIRILKELYYNNGIRSPSAEQIQRISARLRQYGKIEGKNVFYWFQNHKARERQKKRFTSETHLLPNPIQQQQRNGTNAAWKQPEEQPIINHTKYSSNNISAPAGIITSAPSSSAEIVSVGQIGNFGYGSLPMEKSFRDCSISAGGNTGYAGSAINHNLGWMGVDPYSSAYTNFFDKIRPTEEETMEEEGQENGSPEIETLPLFPMHGEDIHSGYFNLKSNSSHYAGGWYQTEEGYFNNGSRASLELSLKYPDFA

SEQ ID NO: 64 - DNA, 888 bp, Glycine max
atggaacctcaacaacaacaacaacaagcacaagggagccaacaacaacaacaaaacgaggatggtggcagtggaaaaggggggtttctgagcaggcaaagtagtacacggtggactccaacaaacgaccagataagaatattgaaggaactttactacaacaatggaattagatccccgagtgcagagcagattcagaggatctctgctaggctgaggcagtacggtaagattgaaggcaagaatgtcttttattggttccagaaccacaaagctcgagaaaggcagaagaaaaggttcacttctgatcataatcataataatgtccccatgcaaagacccccaactaatccttctgctgcttggaaacctgatctagctgatcccattcacaccaccaagtattgtaacatctcttctactgcagggatctcttcggcatcatcttctgttgagatggttactgtgggacagatggggaattatgggtatggttctgtgcctatggagaaaagttttagggactgctcgatatcagctgggggtagcagtggccatgttggattaataaaccacaacttggggtgggttggtgtggacccatataattcctcaacctatgccaacttctttgacaaaataaggccaagtgatcaagaaacccttgaagaagaagcagagaacattggtgctactaagattgaaaccctccctttattccctatgcacggtgaggacatccacggctattgcaacctcaagtctaattcgtataactatgatggaaacggctggtatcatactgaagaagggttcaagaatgcttctcgtgcttccttggagctcagtctcaactcctacactcgcaggtctccagattatgcttaa

SEQ ID NO: 65 - protein, 295 aa, Glycine max
MEPQQQQQQAQGSQQQQQNEDGGSGKGGFLSRQSSTRWTPTNDQIRILKELYYNNGIRSPSAEQIQRISARLRQYGKIEGKNVFYWFQNHKARERQKKRFTSDHNHNNVPMQRPPTNPSAAWKPDLADPIHTTKYCNISSTAGISSASSSVEMVTVGQMGNYGYGSVPMEKSFRDCSISAGGSSGHVGLINHNLGWVGVDPYNSSTYANFFDKIRPSDQETLEEEAENIGATKIETLPLFPMHGEDIHGYCNLKSNSYNYDGNGWYHTEEGFKNASRASLELSLNSYTRRSPDYA

SEQ ID NO: 66 - DNA, 897 bp, Camelina sativa
atggagccaccgcagcatcagcatcatcaccatcaagccgaccaagaaagcggcaataacaacaagtccggttctggtggttacacttgtcgccaaaccagcacgaggtggacaccaacgacggagcagatcaaaatgctcaaagagctttattacaatagtggaatccggtcaccaacagcagatcagatccagaagatcactgctaggctgcgacagttcggaaagatcgagggcaagaacgtcttttactggttccagaaccacaaggctcgtgagcgtcagaagaagagattcaacggcacaaccatgaccacaccgtcttcatctcccaactcggttatgatggctaatgatcattatcatcaacatctccctctacttcaccatcatcatggcgttcccatgcagagacctgcgaactccgtcaacgttaaacttaaccaagagcatcatctctatcatcagaacaagtcatatcccagcttcaataacgggaatttaaatcatgcaagctcaggtactgaatgtggtgctgttaatgcttctaatggctactcaagtagccatatctatggatctatggaacaagactgttctatgaattacaacaacgtaggtggaggatggacggcaaacatggatcataatcatcattactcatcagcaccttacaacttcttcgatagaccaaaacctccgtttggtctagacggtcatcaggaagaagaagaatgtggtggcgatgcttatctggaacatcgacgtacgcttcctctcttccctatgcatggtgaagatcacataaatggtgccagctggaagtatggccaactggacggtcatgattgtcatggtagaggcccttgcgcttctcttgagcttcgtttgaactag

SEQ ID NO: 67 - protein, 298 aa, Camelina sativa
MEPPQHQHHHHQADQESGNNNKSGSGGYTCRQTSTRWTPTTEQIKMLKELYYNSGIRSPTADQIQKITARLRQFGKIEGKNVFYWFQNHKARERQKKRFNGTTMTTPSSSPNSVMMANDHYHQHLPLLHHHHGVPMQRPANSVNVKLNQEHHLYHQNKSYPSFNNGNLNHASSGTECGAVNASNGYSSSHIYGSMEQDCSMNYNNVGGGWTANMDHNHHYSSAPYNFFDRPKPPFGLDGHQEEEECGGDAYLEHRRTLPLFPMHGEDHINGASWKYGQLDGHDCHGRGPCASLELRLN

SEQ ID NO: 68 - DNA, 897 bp, Capsella rubella
atggagccaccacagcatcagcatcatcatcatcaagccgaccaagaaagcggcaacaacaacaacaagtccggctctggtggctacacgtgtcgccaaaccagcactaggtggacaccaacgacggagcagatcagaatcctcaaggatctttactacaacagtgcgatccggtcaccaacagccgatcagatccagaagatcaccgcgaggctgagacagtacgggaagatcgaaggcaagaacgtcttttactggttccagaaccataaggctcgtgagcgtcagaagaagagattcaacggcacaaccatgaccactccatcttcatctcccaactcggttatggtggctaatgatcactatcatcctctacttcaccatcatcatggtgttcccatgcaaaggcctgctaactccgtcaacgtcaaacttaaccaagaccatcatctctatcatcagaacaagtcatatcccaccttcaacaatgggaatttaaatcatggaagctcaggtactgaatgtggtgttgttaatgcttctaatggctacatgagtagccatgtctatggatctatggaacaagactgttcaatgaactacaacaacgtaggtactggaggatacggatcaaacatggatcatagtcatcattactcatctgcaccatacaacttctttgatagatcaaagcctctctttggtctagaaggtcatcaagaagatgaagaagaatatggtataggcgatgcttatctggaacatcgacgtacgcttcctctcttccctatgcatggtgaagatcacatgaacggtagtggtgctagctggaagtttgatggccgtgattgccatggtagaggcccttgcgcttctcttgagcttcgtctgaactag

SEQ ID NO: 69 - protein, 298 aa, Capsella rubella
MEPPQHQHHHHQADQESGNNNNKSGSGGYTCRQTSTRWTPTTEQIRILKDLYYNSAIRSPTADQIQKITARLRQYGKIEGKNVFYWFQNHKARERQKKRFNGTTMTTPSSSPNSVMVANDHYHPLLHHHHGVPMQRPANSVNVKLNQDHHLYHQNKSYPTFNNGNLNHGSSGTECGVVNASNGYMSSHVYGSMEQDCSMNYNNVGTGGYGSNMDHSHHYSSAPYNFFDRSKPLFGLEGHQEDEEEYGIGDAYLEHRRTLPLFPMHGEDHMNGSGASWKFDGRDCHGRGPCASLELRLN

SEQ ID NO: 70 - DNA, 588 bp, Arabis alpina
atggctactcatgtagccattagaagcattaacagcaccacattcagaacctgaacttgcatgatttaaattcccgttattgaagctgggatatgatttgttctgatgaagcagatggtgttcttggtcatgaagcttaacgttgagagaagcaggtctctgcatggaaacaccatgatgatgttgaagaagaggatgatgatgatggttatgatgataacgatcactggccatcataactgagttgggcgatgaagacgttggtgtggtggtcatggttgtgccattgaatctcttcttctgacgctcacgagccttatggttctgaaaccagtaaaagacgtttttgccctcgatcttaccatattgtctcagccttgcagagatcttctggatctcatcagcagttggtgaccggattccactattgtagtaaagatctttgaggattctgatttgctccgtggttggagtccatctcgtgctggtttgacgacaagtgtaaccaccagaaccggacttgttgttgttgttgccgctttcttggtcggcttgatgatgatgatgatgatgttgcggtggctccat

SEQ ID NO: 71 - protein, 304 aa, Arabis alpina
MEPPQHHHHHHQADQESGNNNNKSGSGGYTCRQTSTRWTPTTEQIRILKDLYYNSGIRSPTADEIQKISARLRQYGKIEGKNVFYWFQNHKARERQKKRFNGTTMTTTPTSSSPNSVMMASDRYHHNHHHHPLLQHHHGVSMQRPASLNVKLHDQEHHLLHQNKSYPSFNNGNLNHASSGSECGAVNASNGYMSSHVYGSMEQDYSMSNNNIGGGGWSNMDHNHHYSSPAYNFFDRPKPLFGLEGHQEEDQYGGDAYLEHRRTLPLFPMHGEDHINGGGGAIWKYRQLDGLELRLNSYAGVAPE

SEQ ID NO: 72 - DNA, 873 bp, Raphanus sativus
atggagccaccgcaacattaccatcaagccgatcaagaaagcggcaacaacaacaagtccgtctctggtggttacacgtgtcgtcaaacgagcacaagatggacaccaacaaccgatcaaatcagaatactcaaagatctttactacaacaatggagtccggtcaccaacagccgaccagatccagaagatctctgcaacgctgagacagtacggaaaaatcgagggaaaaaatgtcttttactggtttcaaaaccataaggctcgtgagcgacagaagaagagattcaacagcacaaccatggccacaccaacgtcttcatcgcccaactcggttatgatgatggctagtgatcaccatcatcatcatggtgttaccatccagagacctgctttggtcaacgttaagctcgaccaagaaaatcatatgtttcaccagaacagatcatatcccagctccaataacgggagtataaatcatgcaagttcaggcacggaatatggtgttttcggcgcttctaatggctacattagtaaccatatctatggatctatggaacaagactgttcaatgagctacaacagcgtaggtggaggatggacaaacatggatcataatcatcattactcaactccagcttacaacttctttgatagaccatcgcctctgtctggactagaaggtcatcaagaagaaggacaatatggtggcgattcttatctggaacatcgacgtacacttcctctcttccctttgcacggtgaggatcacatcaacggtggtggtggttccatcttgaagtacggacaatcagacggttgtgatcgttatggtagaggcccttgtgcttctcttaagctatgtctgaactga

SEQ ID NO: 73 - protein, 290 aa, Raphanus sativus
MEPPQHYHQADQESGNNNKSVSGGYTCRQTSTRWTPTTDQIRILKDLYYNNGVRSPTADQIQKISATLRQYGKIEGKNVFYWFQNHKARERQKKRFNSTTMATPTSSSPNSVMMMASDHHHHHGVTIQRPALVNVKLDQENHMFHQNRSYPSSNNGSINHASSGTEYGVFGASNGYISNHIYGSMEQDCSMSYNSVGGGWTNMDHNHHYSTPAYNFFDRPSPLSGLEGHQEEGQYGGDSYLEHRRTLPLFPLHGEDHINGGGGSILKYGQSDGCDRYGRGPCASLKLCLN

SEQ ID NO: 74 - DNA, 885 bp, Brassica napus
atggagccagcgcaacatcaccatcaagccgaccaagaaagcggcaacaacaacaagtccgtctctggtggttacacgtgtcgtcaaacgagtacaagatggacaccaacgaccgatcaaatcagaatactcaaagatctttactacaacaacggagtccggtcaccaacagccgaccagatccagaagatctctgcaaggctgagacagtacggaaagatcgagggaaaaaatgtcttttactggtttcaaaaccataaggctcgtgagcgacagaagaagagattcaacagcacaaccatgaccataccaacgtcttcatcgcccaactcggttatgatggctagtgatcactatcaccataaccatcatcatcatggcgttaccatccagagacctgctttggtcaacgttaagctcgaccaagaaaatcatatgtttcatcagaacagatcatatcccagcttcaataacgggaatacaaatcatgcaagttcaggcacggaatatggtgttttcagtgcttctaatggctacattagtagccatatctatgaacctatggaacaagactgttcaatgagctacaacaacgtaggtggaggatggacaaacatagatcataatcaccattactcaactccagcctacaacttcttagatagaccaatgcctctgtctggactagaaggtcatcatcaagaagaaggagaatatggtggcgatgcttatctggaacatagacgcacacttcctctcttccctttgcacggtgaggatcacatcaacggcggtggtggttccatctggaagtacagacaatcggacggttgtgatcgttatggtagaggcccttgtgcttctcttaagctgtgtctgaactga

SEQ ID NO: 75 - protein, 294 aa, Brassica napus
MEPAQHHHQADQESGNNNKSVSGGYTCRQTSTRWTPTTDQIRILKDLYYNNGVRSPTADQIQKISARLRQYGKIEGKNVFYWFQNHKARERQKKRFNSTTMTIPTSSSPNSVMMASDHYHHNHHHHGVTIQRPALVNVKLDQENHMFHQNRSYPSFNNGNTNHASSGTEYGVFSASNGYISSHIYEPMEQDCSMSYNNVGGGWTNIDHNHHYSTPAYNFLDRPMPLSGLEGHHQEEGEYGGDAYLEHRRTLPLFPLHGEDHINGGGGSIWKYRQSDGCDRYGRGPCASLKLCLN

SEQ ID NO: 76 - DNA, 885 bp, Brassica oleracea
atggagccagcgcaacatcaccatcaagccgaccaagaaagcggcaacaacaacaagtccgtctctggtggttacacgtgtcgtcaaacgagtacaagatggacaccaacgaccgatcaaatcagaatactcaaagatctttactacaacaacggagtccggtcaccaacagccgaccagatccagaagatctctgcaaggctgagacagtacggaaagatcgagggaaaaaatgtcttttactggtttcaaaaccataaggctcgtgagcgacagaagaagagattcaacagcacaaccatgaccataccaacgtcttcatcgcccaactcggttatgatggctagtgatcactatcaccataaccatcatcatcatggcgttaccatccagagacctgctttggtcaacgttaagctcgaccaagaaaatcatatgtttcatcagaacagatcatatcccagcttcaataacgggaatataaatcatgcaagttcaggcacggaatatggtgttttcagtgcttctaatggctacattagtagccatatctatggacctatggaacaagactgttcaatgagctacaacaacgtaggtggaggatggacaaatatagatcataatcaccattactcaactccagcctacaacttcttagatagaccaatgcctctgtctggactagaaggtcatcatcaagaagaaggagaatatggtggcgatgcttatctggaacatagacgcacacttcctctcttccctttgcacggtgaggatcacatcaacggcggtggtggttccatctggaagtacagacaatcggacggttgtgatcgttatggtagaggcccttgtgcttctcttaagctgtgtctgaactga

SEQ ID NO: 77 - protein, 294 aa, Brassica oleracea
MEPAQHHHQADQESGNNNKSVSGGYTCRQTSTRWTPTTDQIRILKDLYYNNGVRSPTADQIQKISARLRQYGKIEGKNVFYWFQNHKARERQKKRFNSTTMTIPTSSSPNSVMMASDHYHHNHHHHGVTIQRPALVNVKLDQENHMFHQNRSYPSFNNGNINHASSGTEYGVFSASNGYISSHIYGPMEQDCSMSYNNVGGGWTNIDHNHHYSTPAYNFLDRPMPLSGLEGHHQEEGEYGGDAYLEHRRTLPLFPLHGEDHINGGGGSIWKYRQSDGCDRYGRGPCASLKLCLN

SEQ ID NO: 78 - DNA, 882 bp, Helianthus annuus
atggaaactcaacaacaacaagcagatattcaagattttgggaacaaaaacagtaacacctatgcatgcaggcaaagcagtactaggtggacacccacaagtgatcagatcagaatactgaaagagctctactacaacaatggaatcagatcaccaactgctgatcagattcagagaatcgctgctcaactcagacagtacggcaagattgaaggcaagaacgtgttttattggtttcagaaccataaagctcgtgaacgccagaagaaacggttcactcctactgctcctccaccaccgtctcacttctccgatcatattaaccaccatcttcccaacgctgcccccatgcagattccgtctcaccaccaccactaccaccatcaagaaccaccacatgtctatgctcaccctcacaaactctacaccactcatcacattggggttggttcttcttcacaaggagtgatgggtgtagggtgtggctatggatctgttgctatggagaagagtttcaggaagtgttcaatatcaccaccgggagagagtaaggccacaggaggaattggccggaatatcggttcaagatcacggataagtgtcgattcgtgttccttcttcgacacaattaagccaaagacatatgagatgtttgagaatcatgatcaagatgaagaacaaggagagccttcaactgagatcgaaacacttccattattcccgattcacgacggcaaccatcatgatttcttcggcatgaggacggcaaatctgcaattggagcaaggcactggaggttactacactggaggaagctggtatcggtctgatgagagggcgtctcttgagctcagtctcaactcatatggttattataactaa

SEQ ID NO: 79 - protein, 293 aa, Helianthus annuus
METQQQQADIQDFGNKNSNTYACRQSSTRWTPTSDQIRILKELYYNNGIRSPTADQIQRIAAQLRQYGKIEGKNVFYWFQNHKARERQKKRFTPTAPPPPSHFSDHINHHLPNAAPMQIPSHHHHYHHQEPPHVYAHPHKLYTTHHIGVGSSSQGVMGVGCGYGSVAMEKSFRKCSISPPGESKATGGIGRNIGSRSRISVDSCSFFDTIKPKTYEMFENHDQDEEQGEPSTEIETLPLFPIHDGNHHDFFGMRTANLQLEQGTGGYYTGGSWYRSDERASLELSLNSYGYYN

SEQ ID NO: 80 - DNA, 795 bp, Populus trichocarpa
atggaacctcaccaacaacaaccaaatgaggataataacggtggcgccaaagggaactttctttgcaggcaaaccagtacaaggtggaatcccactactgaccagataagaatattgaaggaactgtactacatcaaaggtgttaggtccccaaatggagctgagattcagcagatctctgctaggcttagaaagtacggcaagattgaaggcaagaatgtattttattggtttcagaaccataaagctcgtgagaggcaaaagaaaagactcaccaatgaagtccccatgcaacaaagaactgcctggaaacctgaagattattactcttacaagtactccaacagtaataataatcctgggttttcttcggcttcttcatctgcaaataccggtgtggttactgttgggcagacagatagccatggatatggatcggtaaccatgcaggagaagaattcttgggactgttcagcaccagctggtggtagcaatggtgctggtagtggatccatgagcaatattaactatggatcaggggttgacattaactctcacagttcatcctatgctgtatttggtcaagaacaagaagcagctgcaaagattgagactcttcctctatttccaatgcttggtgaggacatcagtagctctttcaacatcaacaatatcaacccagacttttattacagtagcggctgtggctatggtgattatggcaatgacacttcttcccgtacttccctggaccttagtctctactcctacaatggccaaccacaagattattaa

SEQ ID NO: 81 - protein, 264 aa, Populus trichocarpa
MEPHQQQPNEDNNGGAKGNFLCRQTSTRWNPTTDQIRILKELYYIKGVRSPNGAEIQQISARLRKYGKIEGKNVFYWFQNHKARERQKKRLTNEVPMQQRTAWKPEDYYSYKYSNSNNNPGFSSASSSANTGVVTVGQTDSHGYGSVTMQEKNSWDCSAPAGGSNGAGSGSMSNINYGSGVDINSHSSSYAVFGQEQEAAAKIETLPLFPMLGEDISSSFNINNINPDFYYSSGCGYGDYGNDTSSRTSLDLSLYSYNGQPQDY

SEQ ID NO: 82 - DNA, 843 bp, Vitus vinifera
atggaacctcaacaacagctccagcagcagcagcaacaaaaccaacaacagccaaacgaggatagcggcagcagcaaaggcagttttctgtgcaggcaaagcagtacacgctggactcctacaactgaccagataagaatattgaaggacctttactacaacaatggagttaggtccccaagtgctgaacagattcagaggatctcagctaggctgaggcagtacggcaagatcgaaggcaagaacgtcttttattggtttcagaaccataaagctcgtgaaaggcagaagaagcgattcactactgatatgcccatgcaaagatcccttggaaatgccggttggagacctgatgatcccattcacaacaaatttcataccattcccactcctgggatatcttccccatcttcttcttcttcacccagtgtgcttgctgttgggcagatgggaagctttggatatggatctgtggagaggagttttacagactgttcaatatcagcaggtggtggtcgtggtggggttggtggatctataaaccagagcttcgaatgggttggcatggacccatattcttcatcttatgcactctttgacaagagaaaaacaatgggtgaaagcttcgaagaagagcaagaagaagaagcaactccggagattgaaacgctcccactctttcccatgcacgctgaggatatcactggcttttgcaacattaagcccgaatccgacgcctactactccggctggtacaggcccgccgacgccaagaccagttcccgcacttctcttgagcttagcctcaactcctacgccggcaggtccccggattccccctga

SEQ ID NO: 83 - protein, 280 aa, Vitus vinifera
MEPQQQLQQQQQQNQQQPNEDSGSSKGSFLCRQSSTRWTPTTDQIRILKDLYYNNGVRSPSAEQIQRISARLRQYGKIEGKNVFYWFQNHKARERQKKRFTTDMPMQRSLGNAGWRPDDPIHNKFHTIPTPGISSPSSSSSPSVLAVGQMGSFGYGSVERSFTDCSISAGGGRGGVGGSINQSFEWVGMDPYSSSYALFDKRKTMGESFEEEQEEEATPEIETLPLFPMHAEDITGFCNIKPESDAYYSGWYRPADAKTSSRTSLELSLNSYAGRSPDSP

SEQ ID NO: 84 - DNA, 879 bp, Arabidopsis thaliana; identical to SEQ ID NO: 60

SEQ ID NO: 85 - protein, 292 aa, Arabidopsis thaliana; identical to SEQ ID NO: 61

SEQ ID NO: 86 - DNA, 879 bp, Lotus japonicus
atggaacaacctccccaacagcagcaacaaaacgaagacggaggcggatcaagtgggggaaaaggagggttcctcagtaggcagtccagtactaggtggacacccaccacagaccagattcgcatcctcaaggagctctactacaacaacggaatacgctcaccctccgcagaacagatccagaggatctccgcaagactcagacagtacggcaagatcgagggcaagaacgtcttctactggttccaaaaccacaaagcccgcgaaaggcagaagaagcgcttcaccagtgagacacacttgctgcccaacccaattcagcagcaacagcgcaacggaacaaacgcagcttggaagcagccagaggagcaacccatcatcaaccacaccaagtactcctccaacaacatatccgcacccgcagggattatcacaagtgccccatcttcttccgcagaaatagtctccgtggggcagatcggaaacttcggatacggatctctgccaatggagaagtccttcagggactgcagtatctcagccggaggtaacacaggatacgccgggtctgctattaaccacaacctcggatggatgggagtcgacccatactcctctgcttacaccaacttcttcgacaaaatacgcccaacagaggaggagactatggaggaagaaggacaggagaacggctcaccagaaatcgagaccctgcctttgttcccaatgcacggagaggacatccactccggctacttcaacctcaagagtaactcatcccactacgctggcggatggtaccaaactgaggaaggctacttcaacaacggatcacgcgccagtctggagctgtccctgaagtaccctgacttcgcttag

SEQ ID NO: 87 - protein, 292 aa, Lotus japonicus; identical to SEQ ID NO: 63

SEQ ID NO: 88 - DNA, 909 bp, Medicago truncatula
atggaacaacctcagcagcagcagcaaccacagacccaacagcactctccaaacaacggaatcatggggtccagacagagttccaccagatggaccccaacaaccgaccagatccgcattctcaaagacctctactacaacaacggaataaggtctccaagtgccgagcaaatccagaggatctccgcaaggctcagacagtacgggaagatcgagggcaagaacgtcttctactggttccaaaaccacaaagccagagagcgccagaaaaagcgcttcacctccgacgtcaacgtcgtccctatcatccagcgcgcccccaacaacaatactatcataagtgccgccaactggaagcctgaccaccacgaacaacagcagaacattaatgtccacacaaaccactccacatacaacatctcctccgctggcctcagttctgcttcctgctcctcagcagaaatggtcactgtggggcaaataggcaactacggctacgggtctgtcccaatggagaagtctttccgcgaatgcaccatctcagctggatgctcatcatcccaggttggctcaaccataaacccccacatcggctggatcggacaccacgtcgacccatattcaagtgcctacgctaacctcttcgagaaaatacgccccaacgaggagatcatggaagagtacgaccagggacaggaaaacggttccccagagatcgagacactcccactcttccctatgcacggagaagacatccacggagggtattgcaacctcaaatcaaattcctccaactacggaggatggtaccaggcagaagacgcagggttcatgtacggaagtcgtaccacttctctcgagctcagtctgaactcctacggatgcaggtcccccgactacgccaattaa

SEQ ID NO: 89 - protein, 302 aa, Medicago truncatula
MEQPQQQQQPQTQQHSPNNGIMGSRQSSTRWTPTTDQIRILKDLYYNNGIRSPSAEQIQRISARLRQYGKIEGKNVFYWFQNHKARERQKKRFTSDVNVVPIIQRAPNNNTIISAANWKPDHHEQQQNINVHTNHSTYNISSAGLSSASCSSAEMVTVGQIGNYGYGSVPMEKSFRECTISAGCSSSQVGSTINPHIGWIGHHVDPYSSAYANLFEKIRPNEEIMEEYDQGQENGSPEIETLPLFPMHGEDIHGGYCNLKSNSSNYGGWYQAEDAGFMYGSRTTSLELSLNSYGCRSPDYAN

SEQ ID NO: 90 - DNA, 924 bp, Petunia x hybrida
atggaaacagcacagcaccagcagaacaaccaacagcactacctccaccaacacctctccatcggacaaggaacaaacatcgaggacggcagtaacaagaacaactcctccaacttcatgtgcaggcaaaatagtacccgctggacaccaaccactgaccagatcaggatattaaaggacctctactacaacaacggagtcagatcacctaccgctgaacagatccagagaatctccgccaagctcaggcagtacggcaagatcgagggcaagaacgtcttctactggttccagaaccataaagcccgcgagagacaaaagaagcgcctcatcgccgcagccaccaccgataacactaacctcccaatgcagatgcagttccagagaggagtctggagatcctctgcagacgaccccatccaccacaagtatactaatccaggagtgcactgcccttcagcttcttcccacggagttctcgcagtcggacagaacggcaatcacggatacggagccttggcaatggaaaaatccttccgcgactgctccatcagtccaggcagttccatgtcacaccaccaccaccaaaacttcgcttgggcaggagtcgatccttattcctcaaccacaacctaccctttcctcgagaagaccaagcacttcgagaatgaaaccctcgaagctgatgaagagcagcaagaggaggaccaggagaactactactaccaaaggaccacctctgccatcgaaaccctgcctctcttccctatgcacgaggagaacatctcctccttctgcaacctcaagcaccaggagtcatccggaggattctacaccgagtggtacagagcagacgacaacctcgcagcagccagagcttccctcgagctctccttgaactccttcatcggcaactcctcctag

SEQ ID NO: 91 - protein, 307 aa, Petunia x hybrida
METAQHQQNNQQHYLHQHLSIGQGTNIEDGSNKNNSSNFMCRQNSTRWTPTTDQIRILKDLYYNNGVRSPTAEQIQRISAKLRQYGKIEGKNVFYWFQNHKARERQKKRLIAAATTDNTNLPMQMQFQRGVWRSSADDPIHHKYTNPGVHCPSASSHGVLAVGQNGNHGYGALAMEKSFRDCSISPGSSMSHHHHQNFAWAGVDPYSSTTTYPFLEKTKHFENETLEADEEQQEEDQENYYYQRTTSAIETLPLFPMHEENISSFCNLKHQESSGGFYTEWYRADDNLAAARASLELSLNSFIGNSS

SEQ ID NO: 92 - DNA, 864 bp, Phaseolus vulgaris
atggaaccacagcagccccagggcagtcaaccaaacgaggacggtggaagtgggaaaggcggatttctctccagacagtcctccactaggtggactccaaccactgaccagatcagaatactcaaagacctctactacaacaacggaatcagatccccttccgcagaacagatccaaaggatctccgctaggctcagacagtacgggaagatcgagggcaagaacgtcttctactggttccaaaaccacaaggccagggagagacagaagaagaggttcacctccgacaacgtccccatgcaaagacctgcaccaacaaatgctgcacctccttggaaacccgaccaagaccccattcacaccaagtactccaacatctcctccacaggaatctccagtgcatcctcctcctcagtcgagatgatcaccgtcggacaaatggggaactacgggtacggaagtgtgccaatggaaaagtccttcagagactgctccatatccgccggaggatcttccggtcatgttggaataaaccacaacctcggctgggtgggagtcgatccttactcttctgcatacgccaacttcttcgataaaataagaccaaacgaagagaccctcgaggaagaagaagaggaggaggaggaggaagaagaagaggacggaggagcagaaattgagaccctccccctgttcccaatgcacggagaggacattcacggctactgcaacctcaagtccaacagttacaactacgacggcaacggctggtatcacagtgaggatggcttcaaaaacggcagtagggcctccctcgagctctccctcaactcttacaccagaagatcccccgacttcgcatag

SEQ ID NO: 93 - protein, 287 aa, Phaseolus vulgaris
MEPQQPQGSQPNEDGGSGKGGFLSRQSSTRWTPTTDQIRILKDLYYNNGIRSPSAEQIQRISARLRQYGKIEGKNVFYWFQNHKARERQKKRFTSDNVPMQRPAPTNAAPPWKPDQDPIHTKYSNISSTGISSASSSSVEMITVGQMGNYGYGSVPMEKSFRDCSISAGGSSGHVGINHNLGWVGVDPYSSAYANFFDKIRPNEETLEEEEEEEEEEEEEDGGAEIETLPLFPMHGEDIHGYCNLKSNSYNYDGNGWYHSEDGFKNGSRASLELSLNSYTRRSPDFA

SEQ ID NO: 94 - DNA, 963 bp, Zea mays
atggcggccaacgtgggcgcgggcaggagtgctggcggcggcggagccggcactggcactggcactgctgctggcagcggcggcgtgtcgacggccgtgtgccgccctagcggctcgcggtggacgccgacgccggagcagatcaggatcctcaaggagctctactacggctgcggcatccggtcgcccaactcggagcagatccagcgcatcaccgccatgctgcggcagcacggcaagatcgagggcaagaacgtcttctactggttccagaaccacaaggcccgcgagcgccagaagcgccgcctcaccaacctcgacgtcaacgtgcccgtcgccgccgacgacagcgcccaccgccttggcgtcctctcgttgtcgccttcttcaggttgttcaggcgcggcgcctccgtcgcccaccctcggcttctacgccggcggcaatggctccgctgtgatgctggacacgagttccgattggggcagcgctgctgccatggccactgaggcatgcttcatgcaggactacatgggcgtgatgggcggcgcgtcaccgtgggcatgctcctcctcgtcgtcggaggacccgatggcggcgctggcgctggcgccgaaggtgacccgggcgcccgagacgctccctctcttcccgaccggcggcggcggagacgataggcagcccccgcggccgcggcagtctgtcccagcaggcgaggccatccgcggcggcagcagcagcagcagctaccttccgttctggggtgccgcgcccaccccaactggcagtgccacttccgttgcgatccagcagcaacaccagctgatgcagatgcaagagcagtacagcttttacagcaacgcccagctgctgcccggcaccggcagccaggatgcagcagcaacatccctggagctgagcctcagctcctggtgctccccttaccctgcagggaccatgtga

SEQ ID NO: 95 - protein, 320 aa, Zea mays
MAANVGAGRSAGGGGAGTGTGTAAGSGGVSTAVCRPSGSRWTPTPEQIRILKELYYGCGIRSPNSEQIQRITAMLRQHGKIEGKNVFYWFQNHKARERQKRRLTNLDVNVPVAADDSAHRLGVLSLSPSSGCSGAAPPSPTLGFYAGGNGSAVMLDTSSDWGSAAAMATEACFMQDYMGVMGGASPWACSSSSSEDPMAALALAPKVTRAPETLPLFPTGGGGDDRQPPRPRQSVPAGEAIRGGSSSSSYLPFWGAAPTPTGSATSVAIQQQHQLMQMQEQYSFYSNAQLLPGTGSQDAAATSLELSLSSWCSPYPAGTM

SEQ ID NO: 96 - DNA, 978 bp, Zea mays
atggcggccaatgcgggcggcggtggagcgggaggaggcagcggcagcggcagcgtggctgcgccggcggtgtgccgccccagcggctcgcggtggacgccgacgccggagcagatcaggatgctgaaggagctctactacggctgcggcatccggtcgcccagctcggagcagatccagcgcatcaccgccatgctgcggcagcacggcaagatcgagggcaagaacgtcttctactggttccagaaccacaaggcccgcgagcgccagaagcgccgcctcaccagcctcgacgtcaacgtgcccgccgccggcgcggccgacgccaccaccagccaactcggcgtcctctcgctgtcgtcgccgccttcaggcgcggcgcctccctcgcccaccctcggcttctacgccgccggcaatggcggcggatcggctgggctgctggacacgagttccgactggggcagcagcggcgctgccatggccaccgagacatgcttcctgcaggactacatgggcgtgacggacacgggcagctcgtcgcagtggccatgcttctcgtcgtcggacacgataatggcggcggcggcggccgcggcgcgggtggcgacgacgcgggcgcccgagacactccctctcttcccgacctgcggcgacgacgacgacgacgacagccagcccccgccgcggccgcggcacgcagtcccagtcccggcaggcgagaccatccgcggcggcggcggcagcagcagcagctacttgccgttctggggtgccggtgccgcgtccacaactgccggcgccacttcttccgttgcgatccagcagcaacaccagctgcaggagcagtacagcttttacagcaacagcacccagctggccggcaccggcagccaagacgtatcggcttcagcggccgccctggagctgagcctcagctcatggtgctccccttaccctgctgcagggagcatgtga

SEQ ID NO: 97 - protein, 325 aa, Zea mays
MAANAGGGGAGGGSGSGSVAAPAVCRPSGSRWTPTPEQIRMLKELYYGCGIRSPSSEQIQRITAMLRQHGKIEGKNVFYWFQNHKARERQKRRLTSLDVNVPAAGAADATTSQLGVLSLSSPPSGAAPPSPTLGFYAAGNGGGSAGLLDTSSDWGSSGAAMATETCFLQDYMGVTDTGSSSQWPCFSSSDTIMAAAAAAARVATTRAPETLPLFPTCGDDDDDDSQPPPRPRHAVPVPAGETIRGGGGSSSSYLPFWGAGAASTTAGATSSVAIQQQHQLQEQYSFYSNSTQLAGTGSQDVSASAAALELSLSSWCSPYPAAGSM

SEQ ID NO: 98 - DNA, 666 bp, Zea mays
atggaggcgctgagcgggcgggtaggcgtcaagtgcgggcggtggaaccctacggcggagcaggtgaaggtcctgacggagctcttccgcgcggggctgcggacgcccagcacggagcagatccagcgcatctccacccacctcagcgccttcggcaaggtggagagcaagaacgtcttctactggttccagaaccacaaggcccgcgagcgccaccaccacaagaagcgacgccgcggcgcgtcgtcgtcctcccccgacagcggcagcggcaggggaagcaacaacgaggaagacggccgtggtgccgcctcgcagtcgcacgacgccgacgccgacgccgacctcgtgctgcaaccgccagagagcaagcgggaggccagaagctatggccaccatcaccggctcgtgacatgctacgtcagggacgtggtggagcagcaggaggcgtcgccgtcgtgggagcggccgacgagggaggtggagacgctagagctcttccccctcaagtcgtacggcgacctcgaggcggcggagaaggtccggtcgtacgtcagaggaagcggcgccaccagcgagcagtgcagggagttgtccttcttcgacgtcgtctccgccggccgggatccgccgctcgagctcaggctctgcagcttcggtccctag

SEQ ID NO: 99 - protein, 221 aa, Zea mays
MEALSGRVGVKCGRWNPTAEQVKVLTELFRAGLRTPSTEQIQRISTHLSAFGKVESKNVFYWFQNHKARERHHHKKRRRGASSSSPDSGSGRGSNNEEDGRGAASQSHDADADADLVLQPPESKREARSYGHHHRLVTCYVRDVVEQQEASPSWERPTREVETLELFPLKSYGDLEAAEKVRSYVRGSGATSEQCRELSFFDVVSAGRDPPLELRLCSFGP

SEQ ID NO: 100 - DNA, 975 bp, Zea mays
atggagacgccacagcagcaatccgccgccgccgccgccgccgccgcccacgggcaggacgacggcgggtcgccgccgatgtcgccggcctccgccgcggcggcggcgctggcgaacgcgcggtggaacccgaccaaggagcaggtggccgtgctggaggggctgtacgagcacggcctgcgcacccccagcgcggagcagatacagcagatcacgggcaggctgcgggagcacggcgccatcgagggcaagaacgtcttctactggttccagaaccacaaggcccgccagcgccagaggcagaagcaggacagcttcgcctacttcagcaggctcctccgccggcccccgccgctgcccgtgctctccatgccccccgcgccaccgtaccatcacgcccgcgtcccggcgccgcccgcgataccgatgccgatggcgccgccgccgcccgctgcatgcaacgacaacggcggcgcgcgtgtgatctacaggaacccattctacgtggctgcgccgcaggcgccccctgcaaatgccgcctactactacccacagccacagcagcagcagcagcagcaggtgacagtcatgtaccagtacccgagaatggaggtagccggccaggacaagatgatgaccagggccgcggcgcaccagcagcagcagcacaacggcgccgggcaacaaccgggacgcgccggccaccccagccgcgagacgctccagctgttcccgctccagcccaccttcgtgctgcggcacgacaaggggcgcgccgccaacggcagtaataacgactccctgacgtcgacgtcgacggcgactgcgacagcgacagcgacagcgacagcgtccgcttccatctccgaggactcggatggcctggagagcggcagctccggcaagggcgtcgaggaggcgcccgcgctgccgttctatgacttcttcgggctccagtcctccggaggccgctga

SEQ ID NO: 101 - protein, 324 aa, Zea mays
METPQQQSAAAAAAAAHGQDDGGSPPMSPASAAAAALANARWNPTKEQVAVLEGLYEHGLRTPSAEQIQQITGRLREHGAIEGKNVFYWFQNHKARQRQRQKQDSFAYFSRLLRRPPPLPVLSMPPAPPYHHARVPAPPAIPMPMAPPPPAACNDNGGARVIYRNPFYVAAPQAPPANAAYYYPQPQQQQQQQVTVMYQYPRMEVAGQDKMMTRAAAHQQQQHNGAGQQPGRAGHPSRETLQLFPLQPTFVLRHDKGRAANGSNNDSLTSTSTATATATATATASASISEDSDGLESGSSGKGVEEAPALPFYDFFGLQSSGGR

SEQ ID NO: 102 - DNA, 543 bp, Zea mays
atgcatggtgtacgtacgtatctcttaattttcattgtatcaaagctgcaggtgcaagtgccgccgacgacgacgacggtgggtggcacgacgcggtggaacccgtcgccggaccagataagggtgctggagatgctgtaccgcggggggatgcgcacgcccaactcgttccagatcgagcagatcacggaggagctcggcaagtacggccggatcgagggcaagaacgtcttctactggttccagaaccacaaggcccgcgagcgccagaagcagaagcgagctgccctcctcaccctcagcaccaccaccactgcttccacgctgctaccaccagctgctgaaaccaaggagggagtggagacgaaaaaagaagaagcgtgtgaagatgcatcgagccgcaagcggaggtgcagggcctgggaagatgtcgtcgtccatggtggcggcgacgatgccggtacggaggtagctgacgactactacaccgacgacgatgtgaccctggagctcttcccgctgcgtcctgatcaggggaaataa

SEQ ID NO: 103 - protein, 180 aa, Zea mays
MHGVRTYLLIFIVSKLQVQVPPTTTTVGGTTRWNPSPDQIRVLEMLYRGGMRTPNSFQIEQITEELGKYGRIEGKNVFYWFQNHKARERQKQKRAALLTLSTTTTASTLLPPAAETKEGVETKKEEACEDASSRKRRCRAWEDVVVHGGGDDAGTEVADDYYTDDDVTLELFPLRPDQGK

SEQ ID NO: 104 - DNA, 708 bp, Zea mays
atggacacggaggcgccgagcgggcgggtgggcgtcaagtgcgggcggtggaacccgacgccggagcaggtgaaggtcctgacggagctcttccgcgcggggctgcggacgcccagcacggaccagatccagcgcatctccgcccacctcggcgccttcggcaaggtggagagcaagaacgtcttctactggttccagaaccacaaggcccgcgagcgccaccaccacaagaagaagaagcgccgccgacgcggcgcggcaatggcatcgtcgtcctcccccgacagcggcagcggcagcgggagcagcgaggaagacggccgtgttgccgccgccgccgacgccgacctcgtgctgcaaccatcgccgggaagaagcaaaagcaaacgggaggccagaagaagctacggcggcggccaccatcgccggctcgttacatgtaagcagctagcgcacacacatcgctacgtcagggacgttgtggagcagcaggaggaggacacgtgggagcggccgacgagggaggcggtggagactctggagctcttccccctcaagtcgtacgtcgacctcgaggcggagaaggtccggcggtacgtcgtcagggccggcgccagcgagcagtgcagggacttctccttcttcgacgtgtccggcggtcgggatccgccgcttcttgagcttaggctctgcagcttcggtccctag

SEQ ID NO: 105 - protein, 235 aa, Zea mays
MDTEAPSGRVGVKCGRWNPTPEQVKVLTELFRAGLRTPSTDQIQRISAHLGAFGKVESKNVFYWFQNHKARERHHHKKKKRRRRGAAMASSSSPDSGSGSGSSEEDGRVAAAADADLVLQPSPGRSKSKREARRSYGGGHHRRLVTCKQLAHTHRYVRDVVEQQEEDTWERPTREAVETLELFPLKSYVDLEAEKVRRYVVRAGASEQCRDFSFFDVSGGRDPPLLELRLCSFGP

SEQ ID NO: 106 - DNA, 1545 bp, Zea mays
atggcctcctccttcaacaacaaaaccagtcactggccgagcatgtttaggtccaagcacgccgctgagccgtggcaggcgcagcctgacatcagcagctcgccgccgtcgctcctctcaggtggcggctctagcagcaccaccaccatcggccgctgcctcaagcaccccctctcaggttactcaggtggcgaggagcggaccccggatccgaagccccggtggaaccccaggccggagcagatccggattctggaggccatcttcaactccggcatggtcaacccgccgcgcgacgagatcccccgcatccgcatgcgcctgcaggagtacggccaggtcggcgacgccaacgtcttctactggttccagaaccgcaagtcccgctccaagaacaagcagcgcaccggacagctggggctgggccttgcgcgcgcgccgggttgcggggccgctgcgccgcccgtcacgccgcagcccttgatccagaaccaattccaggtgctcgcctcgcccgcgcaggcgccagcttcctcgtcctcgtcctcctccgaccgctcctctgggtccagcaagccggcgccgcagccgatgtccgcgacggcagcggccatgaactttccagggccgctcggcgcggcgtgtgcgcagatgtactaccaagcccaccccgtggcgccggtctcggcgttgccagcgcacaaggtgcaggaccctgtagcctccgacgagcccgtcttccagccgtggccacaaggctacttcctgtcggctgccgaggtcgccagcattctcgggggccagtacaggcacgacgtgcccgtgcagcagcagccaccggcgacgttgcctgcgggagcgttcttggggctgtacaacgaggtgacagagccgactgtcactggtcacaggacatgcgcctggggcccggcggggctcgggcagttctggcccgtgggcggcgctgatcaccatcagcaccacaagcacaataccaccgcggcgaccaacaccgtagcaagggacgcggcgcacgagcacgccacgacgctggggttgctgcagtacggcttcgaagctagcgcggccatggagacggcttccgcggcggtgccccttgctgcgtcgccgggaaccgctgcgagcgtggcgacggctgggctcacatctttgcctgcaagtactaatgctgttgtcgtcaactatgatctgctgcaaggactggcagtgcccgggtccgggtccggggccgtcggtgtcagcaccggcggtgcaccgcctgtcgccgttgccgcggcgcccacggcagcgcaggagggcgtcgtcgtagcactgtgcatcacggacagcgtcacgggcaagagcgtggcacacaacgtcgcggctgccaggctcgacgtgagggcgcagttcggcgaggcggccgttctgctccgcgccgtcggcgaccgcggcgggctcgacctcgtgcccgtccccgtcgacgcgttgggctgcacagtggagccgctccagcacggtgccttttactacgtgctggtataa

SEQ ID NO: 107 - protein, 514 aa, Zea mays
MASSFNNKTSHWPSMFRSKHAAEPWQAQPDISSSPPSLLSGGGSSSTTTIGRCLKHPLSGYSGGEERTPDPKPRWNPRPEQIRILEAIFNSGMVNPPRDEIPRIRMRLQEYGQVGDANVFYWFQNRKSRSKNKQRTGQLGLGLARAPGCGAAAPPVTPQPLIQNQFQVLASPAQAPASSSSSSSDRSSGSSKPAPQPMSATAAAMNFPGPLGAACAQMYYQAHPVAPVSALPAHKVQDPVASDEPVFQPWPQGYFLSAAEVASILGGQYRHDVPVQQQPPATLPAGAFLGLYNEVTEPTVTGHRTCAWGPAGLGQFWPVGGADHHQHHKHNTTAATNTVARDAAHEHATTLGLLQYGFEASAAMETASAAVPLAASPGTAASVATAGLTSLPASTNAVVVNYDLLQGLAVPGSGSGAVGVSTGGAPPVAVAAAPTAAQEGVVVALCITDSVTGKSVAHNVAAARLDVRAQFGEAAVLLRAVGDRGGLDLVPVPVDALGCTVEPLQHGAFYYVLV

SEQ ID NO: 108 - DNA, 2000 bp, Glycine max
tttaaatttgttgcagaatgatcataattaaatttccaaggcaataaaaatccctgtctacaaatttatttccataggggctttggatcgatggcgtggaccccacctgaaagtgacacccttggatctcacgggtttcagtgtcaaacctcatttaataagtcaccccatctcccacccttaatttccaccatccaattctccaatctccttcttcataaattaacggctgtgatctatttgaccctactactactttatgaccattctccattcggttacaaatcaatatttctctcactcccaaattaaaaaattgccaattaccaaacatgccatctctcaaaaagtacaaagtgttactattatttctatttaattagtatagtagtactctttctaataaatttaatattaaaatcacataattgtacgtactacttagtaattgagattcttcaaaataaagagaataactctcaggtaatttagtgaattctgaaagacaataaattgtgtttttgacaaatgttaatacaacaattttatacagtagtaatattttttatatcacaaaaactaaatataatttcatctgaataatctatttattttttaatgtaaatatttatcacttagattatcaagattacgatttttaaagaaaagattaacaagattacgaattgggttaagccaatttgtataagaaaattggatatcatatgcccatgaggtcttgggtcctgtccacaaggaaatttaactcatttttactctatatatacttctaacgtcatatattgcaacaataatatatgcgttactttgacgaaatttctactaacgttggcattgaagttgcttttagaagtacctatcaattttccacgatatttcagtcacattgaaacaacagttgaattcagaaaaaaaaaattaaaaaaattgaacttcaaatacttcacagtccaccttaaacatatcattcacattcatctaagataaaaatcaatcactaattttaattagataatagtattaatagaaacattaaaagccttatctttttataaagctgtttttcattttcatcacatccagcatcgatctcaatccaaactctttcttttcacaccctatgagtaactcaaacctgacatcatccaacacggcgcgtgtatcccactctcttccttggaagacgtaaggaggcaggaagcgcgtgggagaggaactgagaggaaaaaaaggtttgactttggtgaagggtgtgggaaacgtttagaatggccattaagaaagcaccacgtggagcgtaacagccgacgtagtaagtattgctgatcggtttctgtcaacccgcatttaccatttacagtaaatttattaaattaaattaaattaacccatttattacaacacactatgaattgaatgaatgaatatgagcattatatgaagagagagaggaacgtagaaaagaaaactaggataaggtaaaggactaaggagaaaaagaaagagaaagagagaaagggactctgtccccttttgtgtgcgtgtgttttgtcaactgagtgaactctcaagtgaactaacatcaccaaaaaaaccactctcttgcaacctcctcatcacattgctccttctggtattccatataacttattaactttgatttttttctctctttaattttttcttttcttccgatcatgtaacatgctaaaaaataatttgtaagattctggttggttggttttgtagggaatctttttctcttgtttttttctgggttgaatgagaataatgttttgatagtttaaagctttttatttgtttggtttctgatatgggaaagttttgttgtggggtgttagagacaggtttggctcaactgaagtaaggtttggttatcttattaccttatctctcaccacatttaaaaacacacaaaacacagttacacaagtgaagtgtggttttgggaagcaaga

SEQ ID NO: 109 - DNA, 2000 bp, Glycine max
atgaattattatatatgctctatttgttaaattttttaaaataattattttaaaagttatacatagatttttttattggttaatagtataaaattttaactctcacaaaacaccatgcacgaaaattaaactcatgaacaatataaatatacttttttatctgaaataaacgagggaaaatatctcttatttgagaaaaaaaatttaaaaatatttttgttactactatgtcataagttaatatcttggaagtttaaagaatattaacttgttaaaataattcaatattttttttgtctgtaatgtgttagccagtattaacacaattaatttgtttttggtaataacaatgcttagatatggcaagaaaactcatacttgtgggtatccgtctgaattcgtttcgactttgacgggtaatacctgagttgacctggtataggttcgggtttggatttttctcgataatcaaaagtcagatacgggtatgggtatgaggttactagactcgtcccgaccccaaacccgaactcgccctgccacttaaaatctttaaatttttttgcataatttaatcaaaaggcataaaatttttattactagttaattttattttagaatttttacataatttaatattattttcttaactatttttgtagacacatgcgctataataaatttattaatatataagtagttaaaacaaatgtttaacaattaactttctttttctaaaatcaaacttttaatattttttttataaaaaaaaatatttttttaatttaaatcgtgtatgggacagggtcggggataccggataggtacaggaatgagaaaataaatttaaacccgatatcgaatacgaatatgaagatatattgagaagttagaataagagattgagagacaatactcataaccatcccactctccattgcaatgtctaacaatgcttacacatgcacaagcaatgactcagctcaggtaacattcatacattctattaacatgttggcgtcacaagcattattataatacacccaatttttcctattaaatgaaaaagacgacgtaccgtatgcccctccaattaaacacaaccgacatggagaaaatgatgatggttgattgcctacgaaaggtgacaattcgtgaaaacaatgatgatatatgcttgctaaaagagaaataccaataaaatgtttacacattatttattattaactgaacattatataaattgtaaagagtttaataaatatatattgttaagttgaaagtttttgcagcattgttgcttgcacttcttgtgcaacaattctgaccttatttatacattatcaatcaattgaaaatatacagtttattatagatgatgattttaaaatttaacaaatttattataaataatgatttattagacaatggtgtaaaaaacttttatattttactaaaaacatgtttttttaaaatgtatgatgctattattcacgtttctcattttttaacagtcggttgaagacttttagtttagctgcttcacactaccaaggccattccttccccactttgaacaattcacatttttattattttttgcagtacccatatttttcaagtgacagcctactaatcattcaaaggtgtaaaaaattgaatttttattgctatccagcaaccacttttttgtttttttttttgtacaaaatatatagataccatatgtgacatgcctataataaattaataactgaaggctgataaaataaaaggttaataactgaaggtagttttatctacttgtctctacgtcaagaagcacgtgaacacaactgaaaggtgccaacaaaacatgttggaaggttagctacataatcttcggtggagcaaatattccacttgtgcacatgcatgcatatataattggttatttgcaatgcctcattccatgcactgaaactagttgcgacacttgtattgcagtgcacataataacc

SEQ ID NO: 110 - DNA, 2000 bp, Glycine max
acttcgatgttcttgcacttgttatagaattcatgtcataataagtgtgtgctcgaagtaaaaattaattttaattgttttttctatttatacttctaacattagcaatttgcataacaaacaagatttaatacaagattaattttgtaaaattgttactttttttatttattcttgctagaaaaagagaaagaacctttcacgaaaatcttcataatttcatttgaggttcacatatatctttggaagtggaggactacgatgcaacagtttatttattatttcagagaataaccattacccaaaatttctttgaccggagtagcttgtccatgaaataagacatggtggtaataaaaaaaaggattaattgaacattattgtcatggaatagtaaacatacataaattaaatgactcttcatgtctttttttcttcttcatcatgatattcataggaaataatcctcatttgactaattagttgggtcaccaggtgtaccaatagttattggtctttttctttttgagtaacaaataccattgaaaagtcatttaatttattatttgtatgtataatggtagatgatctggaggttattattatatctttttcgggtttgtgttaagtttatttatttttcttaataaatgattcattacaaaaggatttttttaagtgtatatttcttcttttttttctacttcttctttcaagggcaggaaaatctcatatattgtggtccttccttcaccactcccatgtggatggttcacgggttcataattactcacgcttacttagccaacatttagatatgactctatctaaatttttttgtttacttcaacatttctcacttgtcctacttttgttatcgaataatttttggatattaaatggaccttcccagaagttaattttaatgtggccaatttcttctcttttgtaattagctcttagacaataataataatgatatttctagattatctccatttattttcctattcatacgtgattctgttgtgcgattgaatgttagatagacggtgtagatgaggtgcaaaattttaattcagtctgacatgtttaattgtgaagaaaatgttgaaaaaaattaaaataaaagaaaagaaataaatgagaagagaatgcaaagtcttgaattaaataaaaaaatattaatagcaaaataattttaattaacaccacatgactatatcatacaataaatataaggaaaaaataaataagaaaaataattatttagcctgggttgaagcactagttgattttgaccgtgtgtagcaaaatgatccctctcctaagatacgacaaccagttggtttcgaccgacgtgtgcagcaaaagaatcccgaaacttgtgaacactaatgcttttgctctaaaaaataagtttttataggaaaagaaaaagaagatatttgggagaaaggagttatgtgcttgtgttgttcttttttagagaacaagaaatatatatatatatagagagagagagagagatagatcaccttgtgcagcaaacaaaaatatgatcattgtattcaacctatagttattaaaacaaacgtaatagaccagttgactcattaaaataaaatcttaagaaaatttaaaataaatattttattttataaaataaaattaatatatatttataaattttaaattaaaacacagatacttatcgatagaaaatagtaatagtgtgtaggatattaatgaaaggtgaaaggcttttttgttcacccccaagacttgttgatgttgagtcgttggtaacaatacacaccacctaacaccatcacgtgctcaccttcaatttacaatactcgaacgaaacgatttgttagattaagtaactgaaagattaatgttattatttaagaagcttctctcctgagggaggattaaaaaactgtctataaagtaagtttcattttatcctttgaagtgtgtgagagagtgaaaac

SEQ ID NO: 111 - DNA, 10324 bp, Artificial Sequence
  PHP80728 T-DNA
aattacaacggtatatatcctgtcagccaacaccaaaacatcaaaaaaatcgggatcaggatcaggatctgcggccgcatcctgcaggtttaaacggccggccttcactagctagctgctaagctcaaacgagcaggaagcaacgagagggtggcgcgcgaccgacgtgcgtacgtagcatgagcctgagtggagacgttggacgtgtatgtatatacctctctgcgtgttaactatgtacgtaagcggcaggcagtgcaataagtgtggctctgtagtatgtacgtgcgggtacgatgctgtaagctactgaggcaagtccataaataaataatgacacgtgcgtgttctataatctcttcgcttcttcatttgtccccttgcggagtttggcatccattgatgccgttacgctgagaacagacacagcagacgaaccaaaagtgagttcttgtatgaaactatgacccttcatcgctaggctcaaacagcaccccgtacgaacacagcaaattagtcatctaactattagcccctacatgtttcagacgatacataaatatagcccatccttagcaattagctattggccctgcccatcccaagcaatgatctcgaagtatttttaatatatagtatttttaatatgtagcttttaaaattagaagataattttgagacaaaaatctccaagtatttttttgggtattttttactgcctccgtttttctttatttctcgtcacctagtttaattttgtgctaatcggctataaacgaaacagagagaaaagttactctaaaagcaactccaacagattagatataaatcttatatcctgcctagagctgttaaaaagatagacaactttagtggattagtgtatgcaacaaactctccaaatttaagtatcccaactacccaacgcatatcgttcccttttcattggcgcacgaactttcacctgctatagccgacgtacatgttcgttttttttgggcggcgcttactttcttccccgttcgttctcagcatcgcaactcaatttgttatggcggagaagcccttgtatcccaggtagtaatgcacagatatgcattattattattcataaaatcgagctagttaccctatgaggtgacatgaagcgctcacggttactatgacggttagcttcacgactgttggtggcagtagcgtacgacttagctatagttccggacttacctaactgactagagtcacacttagctgaccctagtcacttaggcgcgccgtcgacggatccgtaccatcaactttgtataataaagttgcccggacctctagatatcggatcccggggttaaccttcagcttagaaatgatgtgttttctacacttttctcttcttttttttcttttcatctcacatgaatcaaaaagagaaagcttaattacattaaaggttgatgtgatatttactttctaaatatttgctagaagaaattataatgataacattaaattaagttatagtcatttctatttcggttgtctcccactttctgctatgcttttacaacaacagttcaagatttggaatcgttttctttctccaccaatcgtagtaatacttctttttgtgtttgttgaaattttgcaagattctctcttcctctggttaatacacataacttacttggtaagcttggctgcattttcttttcaagcttttaatcaaagactcactagaaattgcaaaggcaaacataaaattatgtgatcaaactcctactgtgagtttttggttacaaacaaaagttaaaaacaaaagcttgatatttaaaagataaactcaacacatatgcatttgactggcgcacagaagacaattcaagacttgggaaaacagtgagccatcaaaatcgtcagataattcagggaatatattgaatgtggagatgtggtaatcacactattgcacacaaagagtggcaaacaagcggcgcccttggtttggtatagtaagagacaattgttttggactgtttgtgttgccatattcacaaaaatactattgagctatgtatgttaaacattatggtcaatgagtagtagtgaacattcaagtttttttttttttccacttcaagtttttcatcttattattatttttcgttgtgatgcagtagtacggcccatcttcaccagtagtatatcaaagccgaaacagatgacaaattgtttaacatgcacttggattattattgagagttgaaatacaaaggcccgttacaagcccaaacgaaggtacataaaagaaaagcagaaaatgaaaacgaaatcgatagggataagtttttccaactgacggaaacacaaactacaccaggtgaaatagatcacctcccaagtgcatgagacacgaaccaaccacttatcatcagatcacaaaagagctcaaagatctagcgatcgcctaattcagtttgtggccaagctttgatggcaagtcgcaatatctagcgacggccacctcgtgctgctccacataagtctccttgtcggcctcttttatgcgctcgagtctatggtccacgtaatacacgccgggcattttcaagtttttggcaggctttttggagcggtaggtggtcttgaagttacagatgagatggcctccgccgacaagcttcaaggccatgtcggatctaccttcaagaccaccgtcggctgggtaaagcatttcagtattggcttcccagccgagagtcttcttctgcatcacgggaccgtttgatgggaagttcacgccgcggatcttgacgttgtagatcaagcagccgtcttgaagactagtgtcttgggtggcggtcaagactcctccgtcttcgtaggtggtcactctctcccaggtgaatccctctgggaatgactgtttgaagaagtctgggatgccctgggtgtggttgatgaaggttctactcccgtacatgaaggaggtggctagtatgtcgaaggcgaatgggagtggacctccttcgaccaccttgattctcatagtctgggttccctcatagggcttgccctcaccctcagaggtacacttgaagtggtgattattcacggtgccctccatgtataacttcatgtgcatgttctctttaatgagctcctcccccttggacaccatggctgtagagtcaacaatcacaagataaatcagaatcaaaatccatcacgtaatttcaagaagcaatttcgtgaaaaaaaatcctaatctatggccacagaatcaacaaataaggtagttgctaaaggacctgagcaatatctcttgaaataccatacagaatcaacgaataaggcttttatcaacggatctgaacaatttcttgaaaaacgactgaagtatcaacaaataaggctgttgtttaacggatctgaagtagttcatgaaaaaaaccttaatctacgactacagaatcaacaattaaggcttgttgtaaacggatctgaaaatctttatgaaaaaaactctaattagacctaatttacggttataaaatcatcaattaaggacgttcttgcattaataaaagctgaatcttctgattatgaaaatttataatcgatgaaacgatagaaaacacaatcaaatcaacatcatgctgatgtagaacaaacaataaagaagaagaaaaaaaaacggaagaaatctacgaaccttgaaaggagaggtagggaactgcgcaaagagaatgaactaatttgattgcaattgaagtgcgattagggtcgaggggtgtgggggcattttatagcatatgcggtggaaccgttctccaatcatattgtgacgcgtgcccatgtatggtgtgacttggtgtttatgacacagatgatatttcggggagtccttcgtagttgacggtttcgtaatcttgacggagtcagagatgtaccttcaccgcttcacgcttggctttatccgttaccacggcgttattaaattgggcccgcacccgttgcaagttaggaccacagtgtccattacctgaacggtcggctgctaccagtattttacattattaaaatctatggaaaagctgtcacgctagatttttttttttttttttatggataagaaaagactaataggaaagctttcttactccactaaagtctttaataattattttttcaattttcaaataaaatcataatcatcccactaaattctttctcatttgtttttcactttgtaagatattcttccgtagatttttataagtaattctttaagatacatagcataataaattgtatacttttagttacagtctatataaaattagtcatttaaaaaatatagccttaatgatttttttaaaatgaagttatttttttctaatttttctttcttatttattatcgaatgattttttctactaatcgtttagggaagagttttatttttctaatgacgagatgtgttaaatgatgcaacttgaaggcgacatattttttaccaataaaataaaactaaaagatagcttgttgacaaaaacaataattgatgttaaagaaaacgtaagggcaatgggtatcatctaattgttggacaagttgtcttctaaggctaggtaagcttttgttttttattagctgaaatatttatttaattgttctataaataaattttttaaaatgatttttaatgtttttaaatattatttaaaataatttttttaaaattttaacattttagtttttaattattttttatcttacttaaattaattataatttattattttctaccattttatactttccaattaattttatcgaagcattaataccatctggtattttgtcactgcttcgtatgattgtttattaaattttagcttctttcacattggagatgctgggcggtgtgagttacagcatggtgtgaagttaaggtggtttgattatggaacccgaaggtgttggtgcaaggtggataaaattgcttgccaggagatacataaaatgatttacaaaatgaaataaagaataaataaatagtcaagttcaaatttaaatcaaggattagaattatttttccgtacatgatgtaaccgcaatcaccccctgctgaatccagatggccattctggccgaatttaagtgactagggtcaccctgctgaatccagatggccattctggccgaatttaagtgactagggtcacgtgaccctagtcacttaccggattctggccgtaccgagctcgaattcggcccaacttttctatacaaagttgaggtacgagatccgcccatccggccggccagatcctgcaggagatccaagcttggcgcgccgcggacctgaattccagcacactggcggccgttactagtaacggccgccagtgtgctggaattcgcccttcccaagctttgctctagatcaaactcacatccaaacataacatggatatcttccttaccaatcatactaattattttgggttaaatattaatcattatttttaagatattaattaagaaattaaaagattttttaaaaaaatgtataaaattatattattcatgatttttcatacatttgattttgataataaatatattttttttaatttcttaaaaaatgttgcaagacacttattagacatagtcttgttctgtttacaaaagcattcatcatttaatacattaaaaaatatttaatactaacagtagaatcttcttgtgagtggtgtgggagtaggcaacctggcattgaaacgagagaaagagagtcagaaccagaagacaaataaaaagtatgcaacaaacaaatcaaaatcaaagggcaaaggctggggttggctcaattggttgctacattcaattttcaactcagtcaacggttgagattcactctgacttccccaatctaagccgcggatgcaaacggttgaatctaacccacaatccaatctcgttacttaggggcttttccgtcattaactcacccctgccacccggtttccctataaattggaactcaatgctcccctctaaactcgtatcgcttcagagttgagaccaagacacactcgttcatatatctctctgctcttctcttctcttctacctctcaaggtacttttcttctccctctaccaaatcctagattccgtggttcaatttcggatcttgcacttctggtttgctttgccttgctttttcctcaactgggtccatctaggatccatgtgaaactctactctttctttaatatctgcggaatacgcgtttgactttcagatctagtcgaaatcatttcataattgcctttctttcttttagcttatgagaaataaaatcactttttttttatttcaaaataaaccttgggccttgtgctgactgagatggggtttggtgattacagaattttagcgaattttgtaattgtacttgtttgtctgtagttttgttttgttttcttgtttctcatacattccttaggcttcaattttattcgagtataggtcacaataggaattcaaactttgagcaggggaattaatcccttccttcaaatccagtttgtttgtatatatgtttaaaaaatgaaacttttgctttaaattctattataactttttttatggctgaaatttttgcatgtgtctttgctctctgttgtaaatttactgtttaggtactaactctaggcttgttgtgcagtttttgaagtataacaacagaagttcctattccgaagttcctattctctagaaagtataggaacttccaccacacaacacaatggcggccaccgcttccagaaccacccgattctcttcttcctcttcacaccccaccttccccaaacgcattactagatccaccctccctctctctcatcaaaccctcaccaaacccaaccacgctctcaaaatcaaatgttccatctccaaaccccccacggcggcgcccttcaccaaggaagcgccgaccacggagcccttcgtgtcacggttcgcctccggcgaacctcgcaagggcgcggacatccttgtggaggcgctggagaggcagggcgtgacgacggtgttcgcgtaccccggcggtgcgtcgatggagatccaccaggcgctcacgcgctccgccgccatccgcaacgtgctcccgcgccacgagcagggcggcgtcttcgccgccgaaggctacgcgcgttcctccggcctccccggcgtctgcattgccacctccggccccggcgccaccaacctcgtgagcggcctcgccgacgctttaatggacagcgtcccagtcgtcgccatcaccggccaggtcgcccgccggatgatcggcaccgacgccttccaagaaaccccgatcgtggaggtgagcagatccatcacgaagcacaactacctcatcctcgacgtcgacgacatcccccgcgtcgtcgccgaggctttcttcgtcgccacctccggccgccccggtccggtcctcatcgacattcccaaagacgttcagcagcaactcgccgtgcctaattgggacgagcccgttaacctccccggttacctcgccaggctgcccaggccccccgccgaggcccaattggaacacattgtcagactcatcatggaggcccaaaagcccgttctctacgtcggcggtggcagtttgaattccagtgctgaattgaggcgctttgttgaactcactggtattcccgttgctagcactttaatgggtcttggaacttttcctattggtgatgaatattcccttcagatgctgggtatgcatggtactgtttatgctaactatgctgttgacaatagtgatttgttgcttgcctttggggtaaggtttgatgaccgtgttactgggaagcttgaggcttttgctagtagggctaagattgttcacattgatattgattctgccgagattgggaagaacaagcaggcgcacgtgtcggtttgcgcggatttgaagttggccttgaagggaattaatatgattttggaggagaaaggagtggagggtaagtttgatcttggaggttggagagaagagattaatgtgcagaaacacaagtttccattgggttacaagacattccaggacgcgatttctccgcagcatgctatcgaggttcttgatgagttgactaatggagatgctattgttagtactggggttgggcagcatcaaatgtgggctgcgcagttttacaagtacaagagaccgaggcagtggttgacctcagggggtcttggagccatgggttttggattgcctgcggctattggtgctgctgttgctaaccctggggctgttgtggttgacattgatggggatggtagtttcatcatgaatgttcaggagttggccactataagagtggagaatctcccagttaagatattgttgttgaacaatcagcatttgggtatggtggttcagttggaggataggttctacaagtccaatagagctcacacctatcttggagatccgtctagcgagagcgagatattcccaaacatgctcaagtttgctgatgcttgtgggataccggcagcgcgagtgacgaagaaggaagagcttagagcggcaattcagagaatgttggacacccctggcccctaccttcttgatgtcattgtgccccatcaggagcatgtgttgccgatgattcccagtaatggatccttcaaggatgtgataactgagggtgatggtagaacgaggtactgattgcctagaccaaatgttccttgatgcttgttttgtacaatatatataagataatgctgtcctagttgcaggatttggcctgtggtgagcatcatagtctgtagtagttttggtagcaagacattttattttccttttatttaacttactacatgcagtagcatctatctatctctgtagtctgatatctcctgttgtctgtattgtgccgttggattttttgctgtagtgagactgaaaatgatgtgctagtaataatatttctgttagaaatctaagtagagaatctgttgaagaagtcaaaagctaatggaatcaggttacatattcaatgtttttctttttttagcggttggtagacgtgtagattcaacttctcttggagctcacctaggcaatcagtaaaatgcatattccttttttaacttgccatttatttacttttagtggaaattgtgaccaatttgttcatgtagaacggatttggaccattgcgtccacaaaacgtctcttttgctcgatcttcacaaagcgataccgaaatccagagatagttttcaaaagtcagaaatggcaaagttataaatagtaaaacagaatagatgctgtaatcgacttcaataacaagtggcatcacgtttctagttctagacccatcagctgaggtacaaattaattaataagtgactagggtcacgtgaccctagtcacttatgattccgatgacttcgtaggttcctagctcaagccgctcgtgtccaagcgtcacttacgattagctaatgattacggcatctaggaccgactagttcttatgtgcttctagtctccaaatgtggttgatagttattttgctctaagatcaacagtaatgaagtataaatcatcgttgtggtgtgctactcggttaattgagcattaacacacacaaacatgacgaggatggtataatctccaaaaatgtgtactttgttaggtgggaccctatagccttgattaatgtgctatgttaggcatgcctggaaacgtgtgacgcatatgttttgtgaacctgttgatattatatgtgcttttatattaccatattttattaaaatactaatatttattactagtaagatataacattctatctagcttaaaaactaaccataaatattccataataactagatttaccaaactaatatactaaatatacataataaatacaaaattaacaagacaataatcaatatttatgagcttaatatatttagacattatggttggtcgacgataatcatgctaacttttcgtaattgcttgattgaaatatgcttagaataatgcctctttgttctacatggcaaatagggaccattatggtgtaacaccctgggaaccacaaacaccccgaaatgctactaaactacacaactaaccttcatatataaaatttcgacagcatctcctttgaaaatttgcatagacgtggaagcaacagagtataaacagatctagctagctaagtttaaacggccggccatttacaattgaatatatcctgcca

SEQ ID NO: 112 - DNA, 14348 bp, Artificial Sequence
  PHP80730 T-DNA
aattacaacggtatatatcctgtcagccaacaccaaaacatcaaaaaaatcgggatcaggatcaggatctgcggccgcatcctgcaggtttaaacggccggccttcactagctagctgctaagctcaaacgagcaggaagcaacgagagggtggcgcgcgaccgacgtgcgtacgtagcatgagcctgagtggagacgttggacgtgtatgtatatacctctctgcgtgttaactatgtacgtaagcggcaggcagtgcaataagtgtggctctgtagtatgtacgtgcgggtacgatgctgtaagctactgaggcaagtccataaataaataatgacacgtgcgtgttctataatctcttcgcttcttcatttgtccccttgcggagtttggcatccattgatgccgttacgctgagaacagacacagcagacgaaccaaaagtgagttcttgtatgaaactatgacccttcatcgctaggctcaaacagcaccccgtacgaacacagcaaattagtcatctaactattagcccctacatgtttcagacgatacataaatatagcccatccttagcaattagctattggccctgcccatcccaagcaatgatctcgaagtatttttaatatatagtatttttaatatgtagcttttaaaattagaagataattttgagacaaaaatctccaagtatttttttgggtattttttactgcctccgtttttctttatttctcgtcacctagtttaattttgtgctaatcggctataaacgaaacagagagaaaagttactctaaaagcaactccaacagattagatataaatcttatatcctgcctagagctgttaaaaagatagacaactttagtggattagtgtatgcaacaaactctccaaatttaagtatcccaactacccaacgcatatcgttcccttttcattggcgcacgaactttcacctgctatagccgacgtacatgttcgttttttttgggcggcgcttactttcttccccgttcgttctcagcatcgcaactcaatttgttatggcggagaagcccttgtatcccaggtagtaatgcacagatatgcattattattattcataaaatcgagctagttaccctatgaggtgacatgaagcgctcacggttactatgacggttagcttcacgactgttggtggcagtagcgtacgacttagctatagttccggacttacctaactgactagagtcacacttagctgaccctagtcacttaggcgcgccgtcgacggatccgtaccatcaactttgtataataaagttgcccgcggccgccggtacctctgttaatgaacgtaaggagcttctggatgacggctgggacttctttgacaaagagacagagctctaagtgtcttcttttcagtagattatcggtgctagaataaaagagatatgaagggattctgggttctgctctatgtagagtaaagcttggatctttgatctaatctaccgttagtataaaacatctattgagctctcttttatttttcttctcagtgtatagtttgcttattgtttttttggtgtttttttccacctctttgtggtactgacataaacaaagactatcgttttgtcatagaattttgagattttgaagaaaagttggataatttagtatactttttaactgactttataaaacgaattagcttcaattagagcttcacaattctcggattttactgaatgacaagttaacaatttaagctagaaaaaaatatgctctaagcctggacatgttgttagtcatggccagcgtatgtgtacattaggtaaatgaaaacaaaaacaaaaactttgaaggtttctgttaagaaaggaactaatttagcaataagagacatgatattacaagctcaacactgtcgctatatctaccagaagccaacaaatcttccagtgcgtaccattggagccacttttcaggctcattagacaaaagtagcacatataatgtaaagacgaaacgatgataaagagactcacaaggacataatttcaatacagaagaagtttgatgtcattactcattagaaagaaaggtataacacaggaacggaaacatagttgaacaattattcatcaggggctttacaaggccccaaaacacaaaccaccaaagttttaaatgaaacgagacatgaacttcttctgattcataacagagataagtttcctaggtcccaatctagttcagtctcaattccagggaagcgcatggtctgacctcggactgtccatacttccagatagcgccagatcctccgttgatgtggtcctcaccgtgcattggaaagagagggagagtccttctgtgttccaagtaagcatcacctccgcattcctcttcttcttggtgtccctccaagccgaagagaggtttagccctatcgaagaagttgtagggagcggaggagtagtggtgatccatgtttgcccatccgcctccaacgttgttgtagttcatggagcaatcttgctccatagagccgtacacgtgggaagacatgtagccgttggaggcgttgacaactccacattcggttccagaggaggcatggttgagattcccgttgttgaaagaggggtagggcttgttgtggtggtagaggtgatggtcctggttcaacttcacgttgacggagtttgcgggtctttgcataggaactccgtggtggtgatgaagcaaaggatggtagtggtcgttggcggccatcataacagaattgggtgatgaggaaggagtggtcatgttagtcccgttgaaacgcttcttctgcctctcacgagccttgtggttctggaaccagtagaagacgttcttaccctcgatcttaccgaattgacgcaggcgagcggtgatcttctgaatctgatcagcagtaggggagcggatggcattgttgtagtacaactccttcaggatcttgatctgctcagtggtaggtgtccatctggtggaggtctgtctgcaagtgtaccctccggaaccggacttgttgttgttgttgttcccggactcttgatcggcctgatggtggtgatgttggtgctgaggaggctccatggactcattagctagtaatagtattttctttgcttctgctatgtaatagtatttcctttcctttctgcccggccttatatatatatatatatcataccaccgacagaagaagaatatctgcatcctcatttaatatttattgcaacttccaagccgtgaacccgccggatatcctgccacttcttttttctgactcactgcatggtaacatgtggctcacacctgtccacatccaccagtaaaactccacccacaaatattactctctctggactcaaccattagacaaaaaattagttaatattatttaattttgataatttcaataaaaagttaatttattccttaaaatatcatctatattgattatataagaaaaaaaaataagattattaaaaataaaactcaattaaacgaatgatgttttgaaaatacatcattaagtaggtgataaagtaggtgatagttaattaaaatttgtttatattttaatctaacacaattgattttttttttattttttttacatttgaggtctaaagggagtattatgattaaagatttttttgtgtaattatgttagaattatctatcaattttattcataattaattttaacaaaactttatttaaaaaatttgaattcaatactatttggactaactacttgttggtagactctttctttttacacattttttttcatctctccaaataattttacaaatatgtaaaaagaaaacataattttataaataaaaaatgaaacaaaaattaatttctaaactgtatttaatacattaaatgctttttcctgaaatgcattaaatacttatttaatacattaaataagtttctttaatgcattaattttcaaaaattaatttaatacatttaagtaacttatttccgtaattagtaacagtcaaaataataagtgaggtcctttttattgattttttttattctagtttctatttttcaaatttttgtttttttattttatttcagaaaccagaacacatgctgaattaacaataactataatatgcatatataaaataatattctatatatatatatatttaaatataccataaatactatttaatatataaatattacgattataacaaatttaatactctctattgtcttaaatgtaagaaaaaagatcagccagagataagtggaatattccaattattttgtgagaaaatcatcatgcccaccagacaatagtagtagcgaaaagcaagacattctaacacataaattgggtgtttgataattctgtgtttttaagttagacttggtagagaggtgcgtattgaagggttccctcgctgcacgttgtaaaacaattatatccattctttatcaatatatatatatatatattttgtgtacaagctttaaacttcaaaacttactattcgaactctaccacttgcctgaccttatacaaagaagaagaattcagggtccttggtcaaacccacactagtttctccgtgtgtgtgtgtgtatacggattgtttgattaacgatagaattgtcatttacaagattacatgacaaaaaatcaactacttaacagttaaacaccacggagacattaattatctgacaggcaccatatgaacaatcgaaatgacaagtatcataaacattttttttagaaattcatgaactcctgtttaaacgaaagcaatataaactgtactggggtgaatatgccataaaaacagtaaactctaaaagatgcttttattgaaaaataacttttaaaatgttgtttatacgtaaaggtttttggcttaaaaatgggtttaactcctataaaatgagcgaaaattgattttgtaaacttttctttggaatgaatccctgatcattatttttgatccctattatcatggggaaacttgtatgtttaatggaaggttaagtaacccttccaatttctaattgatattcaatagtggttttggggctatgtcccgggccattctggcccactttgtacaagaaagctgggtctagatatctcgagtgcggccgcgaattcggtaccggatccagtcgactgaattggttccggcgccagcctgcttttttgtacaaacttgaagcttcggccggggccgcattcgcaaaacacacctagactagatttgttttgctaacccaattcgagctcggtacctcgcgaatgcatctagatatcggatcccggggttaaccttcagcttagaaatgatgtgttttctacacttttctcttcttttttttcttttcatctcacatgaatcaaaaagagaaagcttaattacattaaaggttgatgtgatatttactttctaaatatttgctagaagaaattataatgataacattaaattaagttatagtcatttctatttcggttgtctcccactttctgctatgcttttacaacaacagttcaagatttggaatcgttttctttctccaccaatcgtagtaatacttctttttgtgtttgttgaaattttgcaagattctctcttcctctggttaatacacataacttacttggtaagcttggctgcattttcttttcaagcttttaatcaaagactcactagaaattgcaaaggcaaacataaaattatgtgatcaaactcctactgtgagtttttggttacaaacaaaagttaaaaacaaaagcttgatatttaaaagataaactcaacacatatgcatttgactggcgcacagaagacaattcaagacttgggaaaacagtgagccatcaaaatcgtcagataattcagggaatatattgaatgtggagatgtggtaatcacactattgcacacaaagagtggcaaacaagcggcgcccttggtttggtatagtaagagacaattgttttggactgtttgtgttgccatattcacaaaaatactattgagctatgtatgttaaacattatggtcaatgagtagtagtgaacattcaagtttttttttttttccacttcaagtttttcatcttattattatttttcgttgtgatgcagtagtacggcccatcttcaccagtagtatatcaaagccgaaacagatgacaaattgtttaacatgcacttggattattattgagagttgaaatacaaaggcccgttacaagcccaaacgaaggtacataaaagaaaagcagaaaatgaaaacgaaatcgatagggataagtttttccaactgacggaaacacaaactacaccaggtgaaatagatcacctcccaagtgcatgagacacgaaccaaccacttatcatcagatcacaaaagagctcaaagatctagcgatcgcctaattcagtttgtggccaagctttgatggcaagtcgcaatatctagcgacggccacctcgtgctgctccacataagtctccttgtcggcctcttttatgcgctcgagtctatggtccacgtaatacacgccgggcattttcaagtttttggcaggctttttggagcggtaggtggtcttgaagttacagatgagatggcctccgccgacaagcttcaaggccatgtcggatctaccttcaagaccaccgtcggctgggtaaagcatttcagtattggcttcccagccgagagtcttcttctgcatcacgggaccgtttgatgggaagttcacgccgcggatcttgacgttgtagatcaagcagccgtcttgaagactagtgtcttgggtggcggtcaagactcctccgtcttcgtaggtggtcactctctcccaggtgaatccctctgggaatgactgtttgaagaagtctgggatgccctgggtgtggttgatgaaggttctactcccgtacatgaaggaggtggctagtatgtcgaaggcgaatgggagtggacctccttcgaccaccttgattctcatagtctgggttccctcatagggcttgccctcaccctcagaggtacacttgaagtggtgattattcacggtgccctccatgtataacttcatgtgcatgttctctttaatgagctcctcccccttggacaccatggctgtagagtcaacaatcacaagataaatcagaatcaaaatccatcacgtaatttcaagaagcaatttcgtgaaaaaaaatcctaatctatggccacagaatcaacaaataaggtagttgctaaaggacctgagcaatatctcttgaaataccatacagaatcaacgaataaggcttttatcaacggatctgaacaatttcttgaaaaacgactgaagtatcaacaaataaggctgttgtttaacggatctgaagtagttcatgaaaaaaaccttaatctacgactacagaatcaacaattaaggcttgttgtaaacggatctgaaaatctttatgaaaaaaactctaattagacctaatttacggttataaaatcatcaattaaggacgttcttgcattaataaaagctgaatcttctgattatgaaaatttataatcgatgaaacgatagaaaacacaatcaaatcaacatcatgctgatgtagaacaaacaataaagaagaagaaaaaaaaacggaagaaatctacgaaccttgaaaggagaggtagggaactgcgcaaagagaatgaactaatttgattgcaattgaagtgcgattagggtcgaggggtgtgggggcattttatagcatatgcggtggaaccgttctccaatcatattgtgacgcgtgcccatgtatggtgtgacttggtgtttatgacacagatgatatttcggggagtccttcgtagttgacggtttcgtaatcttgacggagtcagagatgtaccttcaccgcttcacgcttggctttatccgttaccacggcgttattaaattgggcccgcacccgttgcaagttaggaccacagtgtccattacctgaacggtcggctgctaccagtattttacattattaaaatctatggaaaagctgtcacgctagatttttttttttttttttatggataagaaaagactaataggaaagctttcttactccactaaagtctttaataattattttttcaattttcaaataaaatcataatcatcccactaaattctttctcatttgtttttcactttgtaagatattcttccgtagatttttataagtaattctttaagatacatagcataataaattgtatacttttagttacagtctatataaaattagtcatttaaaaaatatagccttaatgatttttttaaaatgaagttatttttttctaatttttctttcttatttattatcgaatgattttttctactaatcgtttagggaagagttttatttttctaatgacgagatgtgttaaatgatgcaacttgaaggcgacatattttttaccaataaaataaaactaaaagatagcttgttgacaaaaacaataattgatgttaaagaaaacgtaagggcaatgggtatcatctaattgttggacaagttgtcttctaaggctaggtaagcttttgttttttattagctgaaatatttatttaattgttctataaataaattttttaaaatgatttttaatgtttttaaatattatttaaaataatttttttaaaattttaacattttagtttttaattattttttatcttacttaaattaattataatttattattttctaccattttatactttccaattaattttatcgaagcattaataccatctggtattttgtcactgcttcgtatgattgtttattaaattttagcttctttcacattggagatgctgggcggtgtgagttacagcatggtgtgaagttaaggtggtttgattatggaacccgaaggtgttggtgcaaggtggataaaattgcttgccaggagatacataaaatgatttacaaaatgaaataaagaataaataaatagtcaagttcaaatttaaatcaaggattagaattatttttccgtacatgatgtaaccgcaatcaccccctgctgaatccagatggccattctggccgaatttaagtgactagggtcaccctgctgaatccagatggccattctggccgaatttaagtgactagggtcacgtgaccctagtcacttaccggattctggccgtaccgagctcgaattcggcccaacttttctatacaaagttgaggtacgagatccgcccatccggccggccagatcctgcaggagatccaagcttggcgcgccgcggacctgaattccagcacactggcggccgttactagtaacggccgccagtgtgctggaattcgcccttcccaagctttgctctagatcaaactcacatccaaacataacatggatatcttccttaccaatcatactaattattttgggttaaatattaatcattatttttaagatattaattaagaaattaaaagattttttaaaaaaatgtataaaattatattattcatgatttttcatacatttgattttgataataaatatattttttttaatttcttaaaaaatgttgcaagacacttattagacatagtcttgttctgtttacaaaagcattcatcatttaatacattaaaaaatatttaatactaacagtagaatcttcttgtgagtggtgtgggagtaggcaacctggcattgaaacgagagaaagagagtcagaaccagaagacaaataaaaagtatgcaacaaacaaatcaaaatcaaagggcaaaggctggggttggctcaattggttgctacattcaattttcaactcagtcaacggttgagattcactctgacttccccaatctaagccgcggatgcaaacggttgaatctaacccacaatccaatctcgttacttaggggcttttccgtcattaactcacccctgccacccggtttccctataaattggaactcaatgctcccctctaaactcgtatcgcttcagagttgagaccaagacacactcgttcatatatctctctgctcttctcttctcttctacctctcaaggtacttttcttctccctctaccaaatcctagattccgtggttcaatttcggatcttgcacttctggtttgctttgccttgctttttcctcaactgggtccatctaggatccatgtgaaactctactctttctttaatatctgcggaatacgcgtttgactttcagatctagtcgaaatcatttcataattgcctttctttcttttagcttatgagaaataaaatcactttttttttatttcaaaataaaccttgggccttgtgctgactgagatggggtttggtgattacagaattttagcgaattttgtaattgtacttgtttgtctgtagttttgttttgttttcttgtttctcatacattccttaggcttcaattttattcgagtataggtcacaataggaattcaaactttgagcaggggaattaatcccttccttcaaatccagtttgtttgtatatatgtttaaaaaatgaaacttttgctttaaattctattataactttttttatggctgaaatttttgcatgtgtctttgctctctgttgtaaatttactgtttaggtactaactctaggcttgttgtgcagtttttgaagtataacaacagaagttcctattccgaagttcctattctctagaaagtataggaacttccaccacacaacacaatggcggccaccgcttccagaaccacccgattctcttcttcctcttcacaccccaccttccccaaacgcattactagatccaccctccctctctctcatcaaaccctcaccaaacccaaccacgctctcaaaatcaaatgttccatctccaaaccccccacggcggcgcccttcaccaaggaagcgccgaccacggagcccttcgtgtcacggttcgcctccggcgaacctcgcaagggcgcggacatccttgtggaggcgctggagaggcagggcgtgacgacggtgttcgcgtaccccggcggtgcgtcgatggagatccaccaggcgctcacgcgctccgccgccatccgcaacgtgctcccgcgccacgagcagggcggcgtcttcgccgccgaaggctacgcgcgttcctccggcctccccggcgtctgcattgccacctccggccccggcgccaccaacctcgtgagcggcctcgccgacgctttaatggacagcgtcccagtcgtcgccatcaccggccaggtcgcccgccggatgatcggcaccgacgccttccaagaaaccccgatcgtggaggtgagcagatccatcacgaagcacaactacctcatcctcgacgtcgacgacatcccccgcgtcgtcgccgaggctttcttcgtcgccacctccggccgccccggtccggtcctcatcgacattcccaaagacgttcagcagcaactcgccgtgcctaattgggacgagcccgttaacctccccggttacctcgccaggctgcccaggccccccgccgaggcccaattggaacacattgtcagactcatcatggaggcccaaaagcccgttctctacgtcggcggtggcagtttgaattccagtgctgaattgaggcgctttgttgaactcactggtattcccgttgctagcactttaatgggtcttggaacttttcctattggtgatgaatattcccttcagatgctgggtatgcatggtactgtttatgctaactatgctgttgacaatagtgatttgttgcttgcctttggggtaaggtttgatgaccgtgttactgggaagcttgaggcttttgctagtagggctaagattgttcacattgatattgattctgccgagattgggaagaacaagcaggcgcacgtgtcggtttgcgcggatttgaagttggccttgaagggaattaatatgattttggaggagaaaggagtggagggtaagtttgatcttggaggttggagagaagagattaatgtgcagaaacacaagtttccattgggttacaagacattccaggacgcgatttctccgcagcatgctatcgaggttcttgatgagttgactaatggagatgctattgttagtactggggttgggcagcatcaaatgtgggctgcgcagttttacaagtacaagagaccgaggcagtggttgacctcagggggtcttggagccatgggttttggattgcctgcggctattggtgctgctgttgctaaccctggggctgttgtggttgacattgatggggatggtagtttcatcatgaatgttcaggagttggccactataagagtggagaatctcccagttaagatattgttgttgaacaatcagcatttgggtatggtggttcagttggaggataggttctacaagtccaatagagctcacacctatcttggagatccgtctagcgagagcgagatattcccaaacatgctcaagtttgctgatgcttgtgggataccggcagcgcgagtgacgaagaaggaagagcttagagcggcaattcagagaatgttggacacccctggcccctaccttcttgatgtcattgtgccccatcaggagcatgtgttgccgatgattcccagtaatggatccttcaaggatgtgataactgagggtgatggtagaacgaggtactgattgcctagaccaaatgttccttgatgcttgttttgtacaatatatataagataatgctgtcctagttgcaggatttggcctgtggtgagcatcatagtctgtagtagttttggtagcaagacattttattttccttttatttaacttactacatgcagtagcatctatctatctctgtagtctgatatctcctgttgtctgtattgtgccgttggattttttgctgtagtgagactgaaaatgatgtgctagtaataatatttctgttagaaatctaagtagagaatctgttgaagaagtcaaaagctaatggaatcaggttacatattcaatgtttttctttttttagcggttggtagacgtgtagattcaacttctcttggagctcacctaggcaatcagtaaaatgcatattccttttttaacttgccatttatttacttttagtggaaattgtgaccaatttgttcatgtagaacggatttggaccattgcgtccacaaaacgtctcttttgctcgatcttcacaaagcgataccgaaatccagagatagttttcaaaagtcagaaatggcaaagttataaatagtaaaacagaatagatgctgtaatcgacttcaataacaagtggcatcacgtttctagttctagacccatcagctgaggtacaaattaattaataagtgactagggtcacgtgaccctagtcacttatgattccgatgacttcgtaggttcctagctcaagccgctcgtgtccaagcgtcacttacgattagctaatgattacggcatctaggaccgactagttcttatgtgcttctagtctccaaatgtggttgatagttattttgctctaagatcaacagtaatgaagtataaatcatcgttgtggtgtgctactcggttaattgagcattaacacacacaaacatgacgaggatggtataatctccaaaaatgtgtactttgttaggtgggaccctatagccttgattaatgtgctatgttaggcatgcctggaaacgtgtgacgcatatgttttgtgaacctgttgatattatatgtgcttttatattaccatattttattaaaatactaatatttattactagtaagatataacattctatctagcttaaaaactaaccataaatattccataataactagatttaccaaactaatatactaaatatacataataaatacaaaattaacaagacaataatcaatatttatgagcttaatatatttagacattatggttggtcgacgataatcatgctaacttttcgtaattgcttgattgaaatatgcttagaataatgcctctttgttctacatggcaaatagggaccattatggtgtaacaccctgggaaccacaaacaccccgaaatgctactaaactacacaactaaccttcatatataaaatttcgacagcatctcctttgaaaatttgcatagacgtggaagcaacagagtataaacagatctagctagctaagtttaaacggccggccatttacaattgaatatatcctgcca

SEQ ID NO: 113 - DNA, 14348 bp, Artificial Sequence
  PHP80734 T-DNA
aattacaacggtatatatcctgtcagccaacaccaaaacatcaaaaaaatcgggatcaggatcaggatctgcggccgcatcctgcaggtttaaacggccggccttcactagctagctgctaagctcaaacgagcaggaagcaacgagagggtggcgcgcgaccgacgtgcgtacgtagcatgagcctgagtggagacgttggacgtgtatgtatatacctctctgcgtgttaactatgtacgtaagcggcaggcagtgcaataagtgtggctctgtagtatgtacgtgcgggtacgatgctgtaagctactgaggcaagtccataaataaataatgacacgtgcgtgttctataatctcttcgcttcttcatttgtccccttgcggagtttggcatccattgatgccgttacgctgagaacagacacagcagacgaaccaaaagtgagttcttgtatgaaactatgacccttcatcgctaggctcaaacagcaccccgtacgaacacagcaaattagtcatctaactattagcccctacatgtttcagacgatacataaatatagcccatccttagcaattagctattggccctgcccatcccaagcaatgatctcgaagtatttttaatatatagtatttttaatatgtagcttttaaaattagaagataattttgagacaaaaatctccaagtatttttttgggtattttttactgcctccgtttttctttatttctcgtcacctagtttaattttgtgctaatcggctataaacgaaacagagagaaaagttactctaaaagcaactccaacagattagatataaatcttatatcctgcctagagctgttaaaaagatagacaactttagtggattagtgtatgcaacaaactctccaaatttaagtatcccaactacccaacgcatatcgttcccttttcattggcgcacgaactttcacctgctatagccgacgtacatgttcgttttttttgggcggcgcttactttcttccccgttcgttctcagcatcgcaactcaatttgttatggcggagaagcccttgtatcccaggtagtaatgcacagatatgcattattattattcataaaatcgagctagttaccctatgaggtgacatgaagcgctcacggttactatgacggttagcttcacgactgttggtggcagtagcgtacgacttagctatagttccggacttacctaactgactagagtcacacttagctgaccctagtcacttaggcgcgccgtcgacggatccgtaccatcaactttgtataataaagttgcccgcggccgccggtacctctgttaatgaacgtaaggagcttctggatgacggctgggacttctttgacaaagagacagagctctaagtgtcttcttttcagtagattatcggtgctagaataaaagagatatgaagggattctgggttctgctctatgtagagtaaagcttggatctttgatctaatctaccgttagtataaaacatctattgagctctcttttatttttcttctcagtgtatagtttgcttattgtttttttggtgtttttttccacctctttgtggtactgacataaacaaagactatcgttttgtcatagaattttgagattttgaagaaaagttggataatttagtatactttttaactgactttataaaacgaattagcttcaattagagcttcacaattctcggattttactgaatgacaagttaacaatttaagctagaaaaaaatatgctctaagcctggacatgttgttagtcatggccagcgtatgtgtacattaggtaaatgaaaacaaaaacaaaaactttgaaggtttctgttaagaaaggaactaatttagcaataagagacatgatattacaagctcaacactgtcgctatatctaccagaagccaacaaatcttccagtgcgtaccattggagccacttttcaggctcattagacaaaagtagcacatataatgtaaagacgaaacgatgataaagagactcacaaggacataatttcaatacagaagaagtttgatgtcattactcattagaaagaaaggtataacacaggaacggaaacatagttgaacaattattcatcaggggctttacaaggccccaaaacacaaaccaccaaagttttaaatgaaacgagacatgaacttcttctgattcataacagagataagtttcctaggtcccaatctagttcagtctcaattccagggaagcgcatggtctgacctcggactgtccatacttccagatagcgccagatcctccgttgatgtggtcctcaccgtgcattggaaagagagggagagtccttctgtgttccaagtaagcatcacctccgcattcctcttcttcttggtgtccctccaagccgaagagaggtttagccctatcgaagaagttgtagggagcggaggagtagtggtgatccatgtttgcccatccgcctccaacgttgttgtagttcatggagcaatcttgctccatagagccgtacacgtgggaagacatgtagccgttggaggcgttgacaactccacattcggttccagaggaggcatggttgagattcccgttgttgaaagaggggtagggcttgttgtggtggtagaggtgatggtcctggttcaacttcacgttgacggagtttgcgggtctttgcataggaactccgtggtggtgatgaagcaaaggatggtagtggtcgttggcggccatcataacagaattgggtgatgaggaaggagtggtcatgttagtcccgttgaaacgcttcttctgcctctcacgagccttgtggttctggaaccagtagaagacgttcttaccctcgatcttaccgaattgacgcaggcgagcggtgatcttctgaatctgatcagcagtaggggagcggatggcattgttgtagtacaactccttcaggatcttgatctgctcagtggtaggtgtccatctggtggaggtctgtctgcaagtgtaccctccggaaccggacttgttgttgttgttgttcccggactcttgatcggcctgatggtggtgatgttggtgctgaggaggctccatggtcttgcttcccaaaaccacacttcacttgtgtaactgtgttttgtgtgtttttaaatgtggtgagagataaggtaataagataaccaaaccttacttcagttgagccaaacctgtctctaacaccccacaacaaaactttcccatatcagaaaccaaacaaataaaaagctttaaactatcaaaacattattctcattcaacccagaaaaaaacaagagaaaaagattccctacaaaaccaaccaaccagaatcttacaaattattttttagcatgttacatgatcggaagaaaagaaaaaattaaagagagaaaaaaatcaaagttaataagttatatggaataccagaaggagcaatgtgatgaggaggttgcaagagagtggtttttttggtgatgttagttcacttgagagttcactcagttgacaaaacacacgcacacaaaaggggacagagtccctttctctctttctctttctttttctccttagtcctttaccttatcctagttttcttttctacgttcctctctctcttcatataatgctcatattcattcattcaattcatagtgtgttgtaataaatgggttaatttaatttaatttaataaatttactgtaaatggtaaatgcgggttgacagaaaccgatcagcaatacttactacgtcggctgttacgctccacgtggtgctttcttaatggccattctaaacgtttcccacacccttcaccaaagtcaaacctttttttcctctcagttcctctcccacgcgcttcctgcctccttacgtcttccaaggaagagagtgggatacacgcgccgtgttggatgatgtcaggtttgagttactcatagggtgtgaaaagaaagagtttggattgagatcgatgctggatgtgatgaaaatgaaaaacagctttataaaaagataaggcttttaatgtttctattaatactattatctaattaaaattagtgattgatttttatcttagatgaatgtgaatgatatgtttaaggtggactgtgaagtatttgaagttcaatttttttaattttttttttctgaattcaactgttgtttcaatgtgactgaaatatcgtggaaaattgataggtacttctaaaagcaacttcaatgccaacgttagtagaaatttcgtcaaagtaacgcatatattattgttgcaatatatgacgttagaagtatatatagagtaaaaatgagttaaatttccttgtggacaggacccaagacctcatgggcatatgatatccaattttcttatacaaattggcttaacccaattcgtaatcttgttaatcttttctttaaaaatcgtaatcttgataatctaagtgataaatatttacattaaaaaataaatagattattcagatgaaattatatttagtttttgtgatataaaaaatattactactgtataaaattgttgtattaacatttgtcaaaaacacaatttattgtctttcagaattcactaaattacctgagagttattctctttattttgaagaatctcaattactaagtagtacgtacaattatgtgattttaatattaaatttattagaaagagtactactatactaattaaatagaaataatagtaacactttgtactttttgagagatggcatgtttggtaattggcaattttttaatttgggagtgagagaaatattgatttgtaaccgaatggagaatggtcataaagtagtagtagggtcaaatagatcacagccgttaatttatgaagaaggagattggagaattggatggtggaaattaagggtgggagatggggtgacttattaaatgaggtttgacactgaaacccgtgagatccaagggtgtcactttcaggtggggtccacgccatcgatccaaagcccctatggaaataaatttgtagacagggatttttattgccttggaaatttaattatgatcattctgcaacaaatttaaacccgggccattctggcccactttgtacaagaaagctgggtctagatatctcgagtgcggccgcgaattcggtaccggatccagtcgactgaattggttccggcgccagcctgcttttttgtacaaacttgaagcttcggccggggccgcattcgcaaaacacacctagactagatttgttttgctaacccaattcgagctcggtacctcgcgaatgcatctagatatcggatcccggggttaaccttcagcttagaaatgatgtgttttctacacttttctcttcttttttttcttttcatctcacatgaatcaaaaagagaaagcttaattacattaaaggttgatgtgatatttactttctaaatatttgctagaagaaattataatgataacattaaattaagttatagtcatttctatttcggttgtctcccactttctgctatgcttttacaacaacagttcaagatttggaatcgttttctttctccaccaatcgtagtaatacttctttttgtgtttgttgaaattttgcaagattctctcttcctctggttaatacacataacttacttggtaagcttggctgcattttcttttcaagcttttaatcaaagactcactagaaattgcaaaggcaaacataaaattatgtgatcaaactcctactgtgagtttttggttacaaacaaaagttaaaaacaaaagcttgatatttaaaagataaactcaacacatatgcatttgactggcgcacagaagacaattcaagacttgggaaaacagtgagccatcaaaatcgtcagataattcagggaatatattgaatgtggagatgtggtaatcacactattgcacacaaagagtggcaaacaagcggcgcccttggtttggtatagtaagagacaattgttttggactgtttgtgttgccatattcacaaaaatactattgagctatgtatgttaaacattatggtcaatgagtagtagtgaacattcaagtttttttttttttccacttcaagtttttcatcttattattatttttcgttgtgatgcagtagtacggcccatcttcaccagtagtatatcaaagccgaaacagatgacaaattgtttaacatgcacttggattattattgagagttgaaatacaaaggcccgttacaagcccaaacgaaggtacataaaagaaaagcagaaaatgaaaacgaaatcgatagggataagtttttccaactgacggaaacacaaactacaccaggtgaaatagatcacctcccaagtgcatgagacacgaaccaaccacttatcatcagatcacaaaagagctcaaagatctagcgatcgcctaattcagtttgtggccaagctttgatggcaagtcgcaatatctagcgacggccacctcgtgctgctccacataagtctccttgtcggcctcttttatgcgctcgagtctatggtccacgtaatacacgccgggcattttcaagtttttggcaggctttttggagcggtaggtggtcttgaagttacagatgagatggcctccgccgacaagcttcaaggccatgtcggatctaccttcaagaccaccgtcggctgggtaaagcatttcagtattggcttcccagccgagagtcttcttctgcatcacgggaccgtttgatgggaagttcacgccgcggatcttgacgttgtagatcaagcagccgtcttgaagactagtgtcttgggtggcggtcaagactcctccgtcttcgtaggtggtcactctctcccaggtgaatccctctgggaatgactgtttgaagaagtctgggatgccctgggtgtggttgatgaaggttctactcccgtacatgaaggaggtggctagtatgtcgaaggcgaatgggagtggacctccttcgaccaccttgattctcatagtctgggttccctcatagggcttgccctcaccctcagaggtacacttgaagtggtgattattcacggtgccctccatgtataacttcatgtgcatgttctctttaatgagctcctcccccttggacaccatggctgtagagtcaacaatcacaagataaatcagaatcaaaatccatcacgtaatttcaagaagcaatttcgtgaaaaaaaatcctaatctatggccacagaatcaacaaataaggtagttgctaaaggacctgagcaatatctcttgaaataccatacagaatcaacgaataaggcttttatcaacggatctgaacaatttcttgaaaaacgactgaagtatcaacaaataaggctgttgtttaacggatctgaagtagttcatgaaaaaaaccttaatctacgactacagaatcaacaattaaggcttgttgtaaacggatctgaaaatctttatgaaaaaaactctaattagacctaatttacggttataaaatcatcaattaaggacgttcttgcattaataaaagctgaatcttctgattatgaaaatttataatcgatgaaacgatagaaaacacaatcaaatcaacatcatgctgatgtagaacaaacaataaagaagaagaaaaaaaaacggaagaaatctacgaaccttgaaaggagaggtagggaactgcgcaaagagaatgaactaatttgattgcaattgaagtgcgattagggtcgaggggtgtgggggcattttatagcatatgcggtggaaccgttctccaatcatattgtgacgcgtgcccatgtatggtgtgacttggtgtttatgacacagatgatatttcggggagtccttcgtagttgacggtttcgtaatcttgacggagtcagagatgtaccttcaccgcttcacgcttggctttatccgttaccacggcgttattaaattgggcccgcacccgttgcaagttaggaccacagtgtccattacctgaacggtcggctgctaccagtattttacattattaaaatctatggaaaagctgtcacgctagatttttttttttttttttatggataagaaaagactaataggaaagctttcttactccactaaagtctttaataattattttttcaattttcaaataaaatcataatcatcccactaaattctttctcatttgtttttcactttgtaagatattcttccgtagatttttataagtaattctttaagatacatagcataataaattgtatacttttagttacagtctatataaaattagtcatttaaaaaatatagccttaatgatttttttaaaatgaagttatttttttctaatttttctttcttatttattatcgaatgattttttctactaatcgtttagggaagagttttatttttctaatgacgagatgtgttaaatgatgcaacttgaaggcgacatattttttaccaataaaataaaactaaaagatagcttgttgacaaaaacaataattgatgttaaagaaaacgtaagggcaatgggtatcatctaattgttggacaagttgtcttctaaggctaggtaagcttttgttttttattagctgaaatatttatttaattgttctataaataaattttttaaaatgatttttaatgtttttaaatattatttaaaataatttttttaaaattttaacattttagtttttaattattttttatcttacttaaattaattataatttattattttctaccattttatactttccaattaattttatcgaagcattaataccatctggtattttgtcactgcttcgtatgattgtttattaaattttagcttctttcacattggagatgctgggcggtgtgagttacagcatggtgtgaagttaaggtggtttgattatggaacccgaaggtgttggtgcaaggtggataaaattgcttgccaggagatacataaaatgatttacaaaatgaaataaagaataaataaatagtcaagttcaaatttaaatcaaggattagaattatttttccgtacatgatgtaaccgcaatcaccccctgctgaatccagatggccattctggccgaatttaagtgactagggtcaccctgctgaatccagatggccattctggccgaatttaagtgactagggtcacgtgaccctagtcacttaccggattctggccgtaccgagctcgaattcggcccaacttttctatacaaagttgaggtacgagatccgcccatccggccggccagatcctgcaggagatccaagcttggcgcgccgcggacctgaattccagcacactggcggccgttactagtaacggccgccagtgtgctggaattcgcccttcccaagctttgctctagatcaaactcacatccaaacataacatggatatcttccttaccaatcatactaattattttgggttaaatattaatcattatttttaagatattaattaagaaattaaaagattttttaaaaaaatgtataaaattatattattcatgatttttcatacatttgattttgataataaatatattttttttaatttcttaaaaaatgttgcaagacacttattagacatagtcttgttctgtttacaaaagcattcatcatttaatacattaaaaaatatttaatactaacagtagaatcttcttgtgagtggtgtgggagtaggcaacctggcattgaaacgagagaaagagagtcagaaccagaagacaaataaaaagtatgcaacaaacaaatcaaaatcaaagggcaaaggctggggttggctcaattggttgctacattcaattttcaactcagtcaacggttgagattcactctgacttccccaatctaagccgcggatgcaaacggttgaatctaacccacaatccaatctcgttacttaggggcttttccgtcattaactcacccctgccacccggtttccctataaattggaactcaatgctcccctctaaactcgtatcgcttcagagttgagaccaagacacactcgttcatatatctctctgctcttctcttctcttctacctctcaaggtacttttcttctccctctaccaaatcctagattccgtggttcaatttcggatcttgcacttctggtttgctttgccttgctttttcctcaactgggtccatctaggatccatgtgaaactctactctttctttaatatctgcggaatacgcgtttgactttcagatctagtcgaaatcatttcataattgcctttctttcttttagcttatgagaaataaaatcactttttttttatttcaaaataaaccttgggccttgtgctgactgagatggggtttggtgattacagaattttagcgaattttgtaattgtacttgtttgtctgtagttttgttttgttttcttgtttctcatacattccttaggcttcaattttattcgagtataggtcacaataggaattcaaactttgagcaggggaattaatcccttccttcaaatccagtttgtttgtatatatgtttaaaaaatgaaacttttgctttaaattctattataactttttttatggctgaaatttttgcatgtgtctttgctctctgttgtaaatttactgtttaggtactaactctaggcttgttgtgcagtttttgaagtataacaacagaagttcctattccgaagttcctattctctagaaagtataggaacttccaccacacaacacaatggcggccaccgcttccagaaccacccgattctcttcttcctcttcacaccccaccttccccaaacgcattactagatccaccctccctctctctcatcaaaccctcaccaaacccaaccacgctctcaaaatcaaatgttccatctccaaaccccccacggcggcgcccttcaccaaggaagcgccgaccacggagcccttcgtgtcacggttcgcctccggcgaacctcgcaagggcgcggacatccttgtggaggcgctggagaggcagggcgtgacgacggtgttcgcgtaccccggcggtgcgtcgatggagatccaccaggcgctcacgcgctccgccgccatccgcaacgtgctcccgcgccacgagcagggcggcgtcttcgccgccgaaggctacgcgcgttcctccggcctccccggcgtctgcattgccacctccggccccggcgccaccaacctcgtgagcggcctcgccgacgctttaatggacagcgtcccagtcgtcgccatcaccggccaggtcgcccgccggatgatcggcaccgacgccttccaagaaaccccgatcgtggaggtgagcagatccatcacgaagcacaactacctcatcctcgacgtcgacgacatcccccgcgtcgtcgccgaggctttcttcgtcgccacctccggccgccccggtccggtcctcatcgacattcccaaagacgttcagcagcaactcgccgtgcctaattgggacgagcccgttaacctccccggttacctcgccaggctgcccaggccccccgccgaggcccaattggaacacattgtcagactcatcatggaggcccaaaagcccgttctctacgtcggcggtggcagtttgaattccagtgctgaattgaggcgctttgttgaactcactggtattcccgttgctagcactttaatgggtcttggaacttttcctattggtgatgaatattcccttcagatgctgggtatgcatggtactgtttatgctaactatgctgttgacaatagtgatttgttgcttgcctttggggtaaggtttgatgaccgtgttactgggaagcttgaggcttttgctagtagggctaagattgttcacattgatattgattctgccgagattgggaagaacaagcaggcgcacgtgtcggtttgcgcggatttgaagttggccttgaagggaattaatatgattttggaggagaaaggagtggagggtaagtttgatcttggaggttggagagaagagattaatgtgcagaaacacaagtttccattgggttacaagacattccaggacgcgatttctccgcagcatgctatcgaggttcttgatgagttgactaatggagatgctattgttagtactggggttgggcagcatcaaatgtgggctgcgcagttttacaagtacaagagaccgaggcagtggttgacctcagggggtcttggagccatgggttttggattgcctgcggctattggtgctgctgttgctaaccctggggctgttgtggttgacattgatggggatggtagtttcatcatgaatgttcaggagttggccactataagagtggagaatctcccagttaagatattgttgttgaacaatcagcatttgggtatggtggttcagttggaggataggttctacaagtccaatagagctcacacctatcttggagatccgtctagcgagagcgagatattcccaaacatgctcaagtttgctgatgcttgtgggataccggcagcgcgagtgacgaagaaggaagagcttagagcggcaattcagagaatgttggacacccctggcccctaccttcttgatgtcattgtgccccatcaggagcatgtgttgccgatgattcccagtaatggatccttcaaggatgtgataactgagggtgatggtagaacgaggtactgattgcctagaccaaatgttccttgatgcttgttttgtacaatatatataagataatgctgtcctagttgcaggatttggcctgtggtgagcatcatagtctgtagtagttttggtagcaagacattttattttccttttatttaacttactacatgcagtagcatctatctatctctgtagtctgatatctcctgttgtctgtattgtgccgttggattttttgctgtagtgagactgaaaatgatgtgctagtaataatatttctgttagaaatctaagtagagaatctgttgaagaagtcaaaagctaatggaatcaggttacatattcaatgtttttctttttttagcggttggtagacgtgtagattcaacttctcttggagctcacctaggcaatcagtaaaatgcatattccttttttaacttgccatttatttacttttagtggaaattgtgaccaatttgttcatgtagaacggatttggaccattgcgtccacaaaacgtctcttttgctcgatcttcacaaagcgataccgaaatccagagatagttttcaaaagtcagaaatggcaaagttataaatagtaaaacagaatagatgctgtaatcgacttcaataacaagtggcatcacgtttctagttctagacccatcagctgaggtacaaattaattaataagtgactagggtcacgtgaccctagtcacttatgattccgatgacttcgtaggttcctagctcaagccgctcgtgtccaagcgtcacttacgattagctaatgattacggcatctaggaccgactagttcttatgtgcttctagtctccaaatgtggttgatagttattttgctctaagatcaacagtaatgaagtataaatcatcgttgtggtgtgctactcggttaattgagcattaacacacacaaacatgacgaggatggtataatctccaaaaatgtgtactttgttaggtgggaccctatagccttgattaatgtgctatgttaggcatgcctggaaacgtgtgacgcatatgttttgtgaacctgttgatattatatgtgcttttatattaccatattttattaaaatactaatatttattactagtaagatataacattctatctagcttaaaaactaaccataaatattccataataactagatttaccaaactaatatactaaatatacataataaatacaaaattaacaagacaataatcaatatttatgagcttaatatatttagacattatggttggtcgacgataatcatgctaacttttcgtaattgcttgattgaaatatgcttagaataatgcctctttgttctacatggcaaatagggaccattatggtgtaacaccctgggaaccacaaacaccccgaaatgctactaaactacacaactaaccttcatatataaaatttcgacagcatctcctttgaaaatttgcatagacgtggaagcaacagagtataaacagatctagctagctaagtttaaacggccggccatttacaattgaatatatcctgcca

SEQ ID NO: 114 - DNA, 14348 bp, Artificial Sequence
  PHP80736 T-DNA
aattacaacggtatatatcctgtcagccaacaccaaaacatcaaaaaaatcgggatcaggatcaggatctgcggccgcatcctgcaggtttaaacggccggccttcactagctagctgctaagctcaaacgagcaggaagcaacgagagggtggcgcgcgaccgacgtgcgtacgtagcatgagcctgagtggagacgttggacgtgtatgtatatacctctctgcgtgttaactatgtacgtaagcggcaggcagtgcaataagtgtggctctgtagtatgtacgtgcgggtacgatgctgtaagctactgaggcaagtccataaataaataatgacacgtgcgtgttctataatctcttcgcttcttcatttgtccccttgcggagtttggcatccattgatgccgttacgctgagaacagacacagcagacgaaccaaaagtgagttcttgtatgaaactatgacccttcatcgctaggctcaaacagcaccccgtacgaacacagcaaattagtcatctaactattagcccctacatgtttcagacgatacataaatatagcccatccttagcaattagctattggccctgcccatcccaagcaatgatctcgaagtatttttaatatatagtatttttaatatgtagcttttaaaattagaagataattttgagacaaaaatctccaagtatttttttgggtattttttactgcctccgtttttctttatttctcgtcacctagtttaattttgtgctaatcggctataaacgaaacagagagaaaagttactctaaaagcaactccaacagattagatataaatcttatatcctgcctagagctgttaaaaagatagacaactttagtggattagtgtatgcaacaaactctccaaatttaagtatcccaactacccaacgcatatcgttcccttttcattggcgcacgaactttcacctgctatagccgacgtacatgttcgttttttttgggcggcgcttactttcttccccgttcgttctcagcatcgcaactcaatttgttatggcggagaagcccttgtatcccaggtagtaatgcacagatatgcattattattattcataaaatcgagctagttaccctatgaggtgacatgaagcgctcacggttactatgacggttagcttcacgactgttggtggcagtagcgtacgacttagctatagttccggacttacctaactgactagagtcacacttagctgaccctagtcacttaggcgcgccgtcgacggatccgtaccatcaactttgtataataaagttgcccgcggccgccggtacctctgttaatgaacgtaaggagcttctggatgacggctgggacttctttgacaaagagacagagctctaagtgtcttcttttcagtagattatcggtgctagaataaaagagatatgaagggattctgggttctgctctatgtagagtaaagcttggatctttgatctaatctaccgttagtataaaacatctattgagctctcttttatttttcttctcagtgtatagtttgcttattgtttttttggtgtttttttccacctctttgtggtactgacataaacaaagactatcgttttgtcatagaattttgagattttgaagaaaagttggataatttagtatactttttaactgactttataaaacgaattagcttcaattagagcttcacaattctcggattttactgaatgacaagttaacaatttaagctagaaaaaaatatgctctaagcctggacatgttgttagtcatggccagcgtatgtgtacattaggtaaatgaaaacaaaaacaaaaactttgaaggtttctgttaagaaaggaactaatttagcaataagagacatgatattacaagctcaacactgtcgctatatctaccagaagccaacaaatcttccagtgcgtaccattggagccacttttcaggctcattagacaaaagtagcacatataatgtaaagacgaaacgatgataaagagactcacaaggacataatttcaatacagaagaagtttgatgtcattactcattagaaagaaaggtataacacaggaacggaaacatagttgaacaattattcatcaggggctttacaaggccccaaaacacaaaccaccaaagttttaaatgaaacgagacatgaacttcttctgattcataacagagataagtttcctaggtcccaatctagttcagtctcaattccagggaagcgcatggtctgacctcggactgtccatacttccagatagcgccagatcctccgttgatgtggtcctcaccgtgcattggaaagagagggagagtccttctgtgttccaagtaagcatcacctccgcattcctcttcttcttggtgtccctccaagccgaagagaggtttagccctatcgaagaagttgtagggagcggaggagtagtggtgatccatgtttgcccatccgcctccaacgttgttgtagttcatggagcaatcttgctccatagagccgtacacgtgggaagacatgtagccgttggaggcgttgacaactccacattcggttccagaggaggcatggttgagattcccgttgttgaaagaggggtagggcttgttgtggtggtagaggtgatggtcctggttcaacttcacgttgacggagtttgcgggtctttgcataggaactccgtggtggtgatgaagcaaaggatggtagtggtcgttggcggccatcataacagaattgggtgatgaggaaggagtggtcatgttagtcccgttgaaacgcttcttctgcctctcacgagccttgtggttctggaaccagtagaagacgttcttaccctcgatcttaccgaattgacgcaggcgagcggtgatcttctgaatctgatcagcagtaggggagcggatggcattgttgtagtacaactccttcaggatcttgatctgctcagtggtaggtgtccatctggtggaggtctgtctgcaagtgtaccctccggaaccggacttgttgttgttgttgttcccggactcttgatcggcctgatggtggtgatgttggtgctgaggaggctccatggggttattatgtgcactgcaatacaagtgtcgcaactagtttcagtgcatggaatgaggcattgcaaataaccaattatatatgcatgcatgtgcacaagtggaatatttgctccaccgaagattatgtagctaaccttccaacatgttttgttggcacctttcagttgtgttcacgtgcttcttgacgtagagacaagtagataaaactaccttcagttattaaccttttattttatcagccttcagttattaatttattataggcatgtcacatatggtatctatatattttgtacaaaaaaaaaaacaaaaaagtggttgctggatagcaataaaaattcaattttttacacctttgaatgattagtaggctgtcacttgaaaaatatgggtactgcaaaaaataataaaaatgtgaattgttcaaagtggggaaggaatggccttggtagtgtgaagcagctaaactaaaagtcttcaaccgactgttaaaaaatgagaaacgtgaataatagcatcatacattttaaaaaaacatgtttttagtaaaatataaaagttttttacaccattgtctaataaatcattatttataataaatttgttaaattttaaaatcatcatctataataaactgtatattttcaattgattgataatgtataaataaggtcagaattgttgcacaagaagtgcaagcaacaatgctgcaaaaactttcaacttaacaatatatatttattaaactctttacaatttatataatgttcagttaataataaataatgtgtaaacattttattggtatttctcttttagcaagcatatatcatcattgttttcacgaattgtcacctttcgtaggcaatcaaccatcatcattttctccatgtcggttgtgtttaattggaggggcatacggtacgtcgtctttttcatttaataggaaaaattgggtgtattataataatgcttgtgacgccaacatgttaatagaatgtatgaatgttacctgagctgagtcattgcttgtgcatgtgtaagcattgttagacattgcaatggagagtgggatggttatgagtattgtctctcaatctcttattctaacttctcaatatatcttcatattcgtattcgatatcgggtttaaatttattttctcattcctgtacctatccggtatccccgaccctgtcccatacacgatttaaattaaaaaaatatttttttttataaaaaaaatattaaaagtttgattttagaaaaagaaagttaattgttaaacatttgttttaactacttatatattaataaatttattatagcgcatgtgtctacaaaaatagttaagaaaataatattaaattatgtaaaaattctaaaataaaattaactagtaataaaaattttatgccttttgattaaattatgcaaaaaaatttaaagattttaagtggcagggcgagttcgggtttggggtcgggacgagtctagtaacctcatacccatacccgtatctgacttttgattatcgagaaaaatccaaacccgaacctataccaggtcaactcaggtattacccgtcaaagtcgaaacgaattcagacggatacccacaagtatgagttttcttgccatatctaagcattgttattaccaaaaacaaattaattgtgttaatactggctaacacattacagacaaaaaaaatattgaattattttaacaagttaatattctttaaacttccaagatattaacttatgacatagtagtaacaaaaatatttttaaattttttttctcaaataagagatattttccctcgtttatttcagataaaaaagtatatttatattgttcatgagtttaattttcgtgcatggtgttttgtgagagttaaaattttatactattaaccaataaaaaaatctatgtataacttttaaaataattattttaaaaaatttaacaaatagagcatatataataattcatcccgggccattctggcccactttgtacaagaaagctgggtctagatatctcgagtgcggccgcgaattcggtaccggatccagtcgactgaattggttccggcgccagcctgcttttttgtacaaacttgaagcttcggccggggccgcattcgcaaaacacacctagactagatttgttttgctaacccaattcgagctcggtacctcgcgaatgcatctagatatcggatcccggggttaaccttcagcttagaaatgatgtgttttctacacttttctcttcttttttttcttttcatctcacatgaatcaaaaagagaaagcttaattacattaaaggttgatgtgatatttactttctaaatatttgctagaagaaattataatgataacattaaattaagttatagtcatttctatttcggttgtctcccactttctgctatgcttttacaacaacagttcaagatttggaatcgttttctttctccaccaatcgtagtaatacttctttttgtgtttgttgaaattttgcaagattctctcttcctctggttaatacacataacttacttggtaagcttggctgcattttcttttcaagcttttaatcaaagactcactagaaattgcaaaggcaaacataaaattatgtgatcaaactcctactgtgagtttttggttacaaacaaaagttaaaaacaaaagcttgatatttaaaagataaactcaacacatatgcatttgactggcgcacagaagacaattcaagacttgggaaaacagtgagccatcaaaatcgtcagataattcagggaatatattgaatgtggagatgtggtaatcacactattgcacacaaagagtggcaaacaagcggcgcccttggtttggtatagtaagagacaattgttttggactgtttgtgttgccatattcacaaaaatactattgagctatgtatgttaaacattatggtcaatgagtagtagtgaacattcaagtttttttttttttccacttcaagtttttcatcttattattatttttcgttgtgatgcagtagtacggcccatcttcaccagtagtatatcaaagccgaaacagatgacaaattgtttaacatgcacttggattattattgagagttgaaatacaaaggcccgttacaagcccaaacgaaggtacataaaagaaaagcagaaaatgaaaacgaaatcgatagggataagtttttccaactgacggaaacacaaactacaccaggtgaaatagatcacctcccaagtgcatgagacacgaaccaaccacttatcatcagatcacaaaagagctcaaagatctagcgatcgcctaattcagtttgtggccaagctttgatggcaagtcgcaatatctagcgacggccacctcgtgctgctccacataagtctccttgtcggcctcttttatgcgctcgagtctatggtccacgtaatacacgccgggcattttcaagtttttggcaggctttttggagcggtaggtggtcttgaagttacagatgagatggcctccgccgacaagcttcaaggccatgtcggatctaccttcaagaccaccgtcggctgggtaaagcatttcagtattggcttcccagccgagagtcttcttctgcatcacgggaccgtttgatgggaagttcacgccgcggatcttgacgttgtagatcaagcagccgtcttgaagactagtgtcttgggtggcggtcaagactcctccgtcttcgtaggtggtcactctctcccaggtgaatccctctgggaatgactgtttgaagaagtctgggatgccctgggtgtggttgatgaaggttctactcccgtacatgaaggaggtggctagtatgtcgaaggcgaatgggagtggacctccttcgaccaccttgattctcatagtctgggttccctcatagggcttgccctcaccctcagaggtacacttgaagtggtgattattcacggtgccctccatgtataacttcatgtgcatgttctctttaatgagctcctcccccttggacaccatggctgtagagtcaacaatcacaagataaatcagaatcaaaatccatcacgtaatttcaagaagcaatttcgtgaaaaaaaatcctaatctatggccacagaatcaacaaataaggtagttgctaaaggacctgagcaatatctcttgaaataccatacagaatcaacgaataaggcttttatcaacggatctgaacaatttcttgaaaaacgactgaagtatcaacaaataaggctgttgtttaacggatctgaagtagttcatgaaaaaaaccttaatctacgactacagaatcaacaattaaggcttgttgtaaacggatctgaaaatctttatgaaaaaaactctaattagacctaatttacggttataaaatcatcaattaaggacgttcttgcattaataaaagctgaatcttctgattatgaaaatttataatcgatgaaacgatagaaaacacaatcaaatcaacatcatgctgatgtagaacaaacaataaagaagaagaaaaaaaaacggaagaaatctacgaaccttgaaaggagaggtagggaactgcgcaaagagaatgaactaatttgattgcaattgaagtgcgattagggtcgaggggtgtgggggcattttatagcatatgcggtggaaccgttctccaatcatattgtgacgcgtgcccatgtatggtgtgacttggtgtttatgacacagatgatatttcggggagtccttcgtagttgacggtttcgtaatcttgacggagtcagagatgtaccttcaccgcttcacgcttggctttatccgttaccacggcgttattaaattgggcccgcacccgttgcaagttaggaccacagtgtccattacctgaacggtcggctgctaccagtattttacattattaaaatctatggaaaagctgtcacgctagatttttttttttttttttatggataagaaaagactaataggaaagctttcttactccactaaagtctttaataattattttttcaattttcaaataaaatcataatcatcccactaaattctttctcatttgtttttcactttgtaagatattcttccgtagatttttataagtaattctttaagatacatagcataataaattgtatacttttagttacagtctatataaaattagtcatttaaaaaatatagccttaatgatttttttaaaatgaagttatttttttctaatttttctttcttatttattatcgaatgattttttctactaatcgtttagggaagagttttatttttctaatgacgagatgtgttaaatgatgcaacttgaaggcgacatattttttaccaataaaataaaactaaaagatagcttgttgacaaaaacaataattgatgttaaagaaaacgtaagggcaatgggtatcatctaattgttggacaagttgtcttctaaggctaggtaagcttttgttttttattagctgaaatatttatttaattgttctataaataaattttttaaaatgatttttaatgtttttaaatattatttaaaataatttttttaaaattttaacattttagtttttaattattttttatcttacttaaattaattataatttattattttctaccattttatactttccaattaattttatcgaagcattaataccatctggtattttgtcactgcttcgtatgattgtttattaaattttagcttctttcacattggagatgctgggcggtgtgagttacagcatggtgtgaagttaaggtggtttgattatggaacccgaaggtgttggtgcaaggtggataaaattgcttgccaggagatacataaaatgatttacaaaatgaaataaagaataaataaatagtcaagttcaaatttaaatcaaggattagaattatttttccgtacatgatgtaaccgcaatcaccccctgctgaatccagatggccattctggccgaatttaagtgactagggtcaccctgctgaatccagatggccattctggccgaatttaagtgactagggtcacgtgaccctagtcacttaccggattctggccgtaccgagctcgaattcggcccaacttttctatacaaagttgaggtacgagatccgcccatccggccggccagatcctgcaggagatccaagcttggcgcgccgcggacctgaattccagcacactggcggccgttactagtaacggccgccagtgtgctggaattcgcccttcccaagctttgctctagatcaaactcacatccaaacataacatggatatcttccttaccaatcatactaattattttgggttaaatattaatcattatttttaagatattaattaagaaattaaaagattttttaaaaaaatgtataaaattatattattcatgatttttcatacatttgattttgataataaatatattttttttaatttcttaaaaaatgttgcaagacacttattagacatagtcttgttctgtttacaaaagcattcatcatttaatacattaaaaaatatttaatactaacagtagaatcttcttgtgagtggtgtgggagtaggcaacctggcattgaaacgagagaaagagagtcagaaccagaagacaaataaaaagtatgcaacaaacaaatcaaaatcaaagggcaaaggctggggttggctcaattggttgctacattcaattttcaactcagtcaacggttgagattcactctgacttccccaatctaagccgcggatgcaaacggttgaatctaacccacaatccaatctcgttacttaggggcttttccgtcattaactcacccctgccacccggtttccctataaattggaactcaatgctcccctctaaactcgtatcgcttcagagttgagaccaagacacactcgttcatatatctctctgctcttctcttctcttctacctctcaaggtacttttcttctccctctaccaaatcctagattccgtggttcaatttcggatcttgcacttctggtttgctttgccttgctttttcctcaactgggtccatctaggatccatgtgaaactctactctttctttaatatctgcggaatacgcgtttgactttcagatctagtcgaaatcatttcataattgcctttctttcttttagcttatgagaaataaaatcactttttttttatttcaaaataaaccttgggccttgtgctgactgagatggggtttggtgattacagaattttagcgaattttgtaattgtacttgtttgtctgtagttttgttttgttttcttgtttctcatacattccttaggcttcaattttattcgagtataggtcacaataggaattcaaactttgagcaggggaattaatcccttccttcaaatccagtttgtttgtatatatgtttaaaaaatgaaacttttgctttaaattctattataactttttttatggctgaaatttttgcatgtgtctttgctctctgttgtaaatttactgtttaggtactaactctaggcttgttgtgcagtttttgaagtataacaacagaagttcctattccgaagttcctattctctagaaagtataggaacttccaccacacaacacaatggcggccaccgcttccagaaccacccgattctcttcttcctcttcacaccccaccttccccaaacgcattactagatccaccctccctctctctcatcaaaccctcaccaaacccaaccacgctctcaaaatcaaatgttccatctccaaaccccccacggcggcgcccttcaccaaggaagcgccgaccacggagcccttcgtgtcacggttcgcctccggcgaacctcgcaagggcgcggacatccttgtggaggcgctggagaggcagggcgtgacgacggtgttcgcgtaccccggcggtgcgtcgatggagatccaccaggcgctcacgcgctccgccgccatccgcaacgtgctcccgcgccacgagcagggcggcgtcttcgccgccgaaggctacgcgcgttcctccggcctccccggcgtctgcattgccacctccggccccggcgccaccaacctcgtgagcggcctcgccgacgctttaatggacagcgtcccagtcgtcgccatcaccggccaggtcgcccgccggatgatcggcaccgacgccttccaagaaaccccgatcgtggaggtgagcagatccatcacgaagcacaactacctcatcctcgacgtcgacgacatcccccgcgtcgtcgccgaggctttcttcgtcgccacctccggccgccccggtccggtcctcatcgacattcccaaagacgttcagcagcaactcgccgtgcctaattgggacgagcccgttaacctccccggttacctcgccaggctgcccaggccccccgccgaggcccaattggaacacattgtcagactcatcatggaggcccaaaagcccgttctctacgtcggcggtggcagtttgaattccagtgctgaattgaggcgctttgttgaactcactggtattcccgttgctagcactttaatgggtcttggaacttttcctattggtgatgaatattcccttcagatgctgggtatgcatggtactgtttatgctaactatgctgttgacaatagtgatttgttgcttgcctttggggtaaggtttgatgaccgtgttactgggaagcttgaggcttttgctagtagggctaagattgttcacattgatattgattctgccgagattgggaagaacaagcaggcgcacgtgtcggtttgcgcggatttgaagttggccttgaagggaattaatatgattttggaggagaaaggagtggagggtaagtttgatcttggaggttggagagaagagattaatgtgcagaaacacaagtttccattgggttacaagacattccaggacgcgatttctccgcagcatgctatcgaggttcttgatgagttgactaatggagatgctattgttagtactggggttgggcagcatcaaatgtgggctgcgcagttttacaagtacaagagaccgaggcagtggttgacctcagggggtcttggagccatgggttttggattgcctgcggctattggtgctgctgttgctaaccctggggctgttgtggttgacattgatggggatggtagtttcatcatgaatgttcaggagttggccactataagagtggagaatctcccagttaagatattgttgttgaacaatcagcatttgggtatggtggttcagttggaggataggttctacaagtccaatagagctcacacctatcttggagatccgtctagcgagagcgagatattcccaaacatgctcaagtttgctgatgcttgtgggataccggcagcgcgagtgacgaagaaggaagagcttagagcggcaattcagagaatgttggacacccctggcccctaccttcttgatgtcattgtgccccatcaggagcatgtgttgccgatgattcccagtaatggatccttcaaggatgtgataactgagggtgatggtagaacgaggtactgattgcctagaccaaatgttccttgatgcttgttttgtacaatatatataagataatgctgtcctagttgcaggatttggcctgtggtgagcatcatagtctgtagtagttttggtagcaagacattttattttccttttatttaacttactacatgcagtagcatctatctatctctgtagtctgatatctcctgttgtctgtattgtgccgttggattttttgctgtagtgagactgaaaatgatgtgctagtaataatatttctgttagaaatctaagtagagaatctgttgaagaagtcaaaagctaatggaatcaggttacatattcaatgtttttctttttttagcggttggtagacgtgtagattcaacttctcttggagctcacctaggcaatcagtaaaatgcatattccttttttaacttgccatttatttacttttagtggaaattgtgaccaatttgttcatgtagaacggatttggaccattgcgtccacaaaacgtctcttttgctcgatcttcacaaagcgataccgaaatccagagatagttttcaaaagtcagaaatggcaaagttataaatagtaaaacagaatagatgctgtaatcgacttcaataacaagtggcatcacgtttctagttctagacccatcagctgaggtacaaattaattaataagtgactagggtcacgtgaccctagtcacttatgattccgatgacttcgtaggttcctagctcaagccgctcgtgtccaagcgtcacttacgattagctaatgattacggcatctaggaccgactagttcttatgtgcttctagtctccaaatgtggttgatagttattttgctctaagatcaacagtaatgaagtataaatcatcgttgtggtgtgctactcggttaattgagcattaacacacacaaacatgacgaggatggtataatctccaaaaatgtgtactttgttaggtgggaccctatagccttgattaatgtgctatgttaggcatgcctggaaacgtgtgacgcatatgttttgtgaacctgttgatattatatgtgcttttatattaccatattttattaaaatactaatatttattactagtaagatataacattctatctagcttaaaaactaaccataaatattccataataactagatttaccaaactaatatactaaatatacataataaatacaaaattaacaagacaataatcaatatttatgagcttaatatatttagacattatggttggtcgacgataatcatgctaacttttcgtaattgcttgattgaaatatgcttagaataatgcctctttgttctacatggcaaatagggaccattatggtgtaacaccctgggaaccacaaacaccccgaaatgctactaaactacacaactaaccttcatatataaaatttcgacagcatctcctttgaaaatttgcatagacgtggaagcaacagagtataaacagatctagctagctaagtttaaacggccggccatttacaattgaatatatcctgcca

SEQ ID NO: 115 - DNA, 14157 bp, Artificial Sequence
  PHP81060 T-DNA
aattacaacggtatatatcctgtcagccaacaccaaaacatcaaaaaaatcgggatcaggatcaggatctgcggccgcatcctgcaggtttaaacggccggccttcactagctagctgctaagctcaaacgagcaggaagcaacgagagggtggcgcgcgaccgacgtgcgtacgtagcatgagcctgagtggagacgttggacgtgtatgtatatacctctctgcgtgttaactatgtacgtaagcggcaggcagtgcaataagtgtggctctgtagtatgtacgtgcgggtacgatgctgtaagctactgaggcaagtccataaataaataatgacacgtgcgtgttctataatctcttcgcttcttcatttgtccccttgcggagtttggcatccattgatgccgttacgctgagaacagacacagcagacgaaccaaaagtgagttcttgtatgaaactatgacccttcatcgctaggctcaaacagcaccccgtacgaacacagcaaattagtcatctaactattagcccctacatgtttcagacgatacataaatatagcccatccttagcaattagctattggccctgcccatcccaagcaatgatctcgaagtatttttaatatatagtatttttaatatgtagcttttaaaattagaagataattttgagacaaaaatctccaagtatttttttgggtattttttactgcctccgtttttctttatttctcgtcacctagtttaattttgtgctaatcggctataaacgaaacagagagaaaagttactctaaaagcaactccaacagattagatataaatcttatatcctgcctagagctgttaaaaagatagacaactttagtggattagtgtatgcaacaaactctccaaatttaagtatcccaactacccaacgcatatcgttcccttttcattggcgcacgaactttcacctgctatagccgacgtacatgttcgttttttttgggcggcgcttactttcttccccgttcgttctcagcatcgcaactcaatttgttatggcggagaagcccttgtatcccaggtagtaatgcacagatatgcattattattattcataaaatcgagctagttaccctatgaggtgacatgaagcgctcacggttactatgacggttagcttcacgactgttggtggcagtagcgtacgacttagctatagttccggacttacctaactgactagagtcacacttagctgaccctagtcacttaggcgcgccgtcgacggatccgtaccatcaactttgtataataaagttgcccgcggccgccggtacctctgttaatgaacgtaaggagcttctggatgacggctgggacttctttgacaaagagacagagctctaagtgtcttcttttcagtagattatcggtgctagaataaaagagatatgaagggattctgggttctgctctatgtagagtaaagcttggatctttgatctaatctaccgttagtataaaacatctattgagctctcttttatttttcttctcagtgtatagtttgcttattgtttttttggtgtttttttccacctctttgtggtactgacataaacaaagactatcgttttgtcatagaattttgagattttgaagaaaagttggataatttagtatactttttaactgactttataaaacgaattagcttcaattagagcttcacaattctcggattttactgaatgacaagttaacaatttaagctagaaaaaaatatgctctaagcctggacatgttgttagtcatggccagcgtatgtgtacattaggtaaatgaaaacaaaaacaaaaactttgaaggtttctgttaagaaaggaactaatttagcaataagagacatgatattacaagctcaacactgtcgctatatctaccagaagccaacaaatcttccagtgcgtaccattggagccacttttcaggctcattagacaaaagtagcacatataatgtaaagacgaaacgatgataaagagactcacaaggacataatttcaatacagaagaagtttgatgtcattactcattagaaagaaaggtataacacaggaacggaaacatagttgaacaattattcatcaggggctttacaaggccccaaaacacaaaccaccaaagttttaaatgaaacgagacatgaacttcttctgattcataacagagataagtttcctaggtcccaatctagttcagtctcaattccagggaagcgcatggtctgacctcggactgtccatacttccagatagcgccagatcctccgttgatgtggtcctcaccgtgcattggaaagagagggagagtccttctgtgttccaagtaagcatcacctccgcattcctcttcttcttggtgtccctccaagccgaagagaggtttagccctatcgaagaagttgtagggagcggaggagtagtggtgatccatgtttgcccatccgcctccaacgttgttgtagttcatggagcaatcttgctccatagagccgtacacgtgggaagacatgtagccgttggaggcgttgacaactccacattcggttccagaggaggcatggttgagattcccgttgttgaaagaggggtagggcttgttgtggtggtagaggtgatggtcctggttcaacttcacgttgacggagtttgcgggtctttgcataggaactccgtggtggtgatgaagcaaaggatggtagtggtcgttggcggccatcataacagaattgggtgatgaggaaggagtggtcatgttagtcccgttgaaacgcttcttctgcctctcacgagccttgtggttctggaaccagtagaagacgttcttaccctcgatcttaccgaattgacgcaggcgagcggtgatcttctgaatctgatcagcagtaggggagcggatggcattgttgtagtacaactccttcaggatcttgatctgctcagtggtaggtgtccatctggtggaggtctgtctgcaagtgtaccctccggaaccggacttgttgttgttgttgttcccggactcttgatcggcctgatggtggtgatgttggtgctgaggaggctccatgggttttcactctctcacacacttcaaaggataaaatgaaacttactttatagacagttttttaatcctccctcaggagagaagcttcttaaataataacattaatctttcagttacttaatctaacaaatcgtttcgttcgagtattgtaaattgaaggtgagcacgtgatggtgttaggtggtgtgtattgttaccaacgactcaacatcaacaagtcttgggggtgaacaaaaaagcctttcacctttcattaatatcctacacactattactattttctatcgataagtatctgtgttttaatttaaaatttataaatatatattaattttattttataaaataaaatatttattttaaattttcttaagattttattttaatgagtcaactggtctattacgtttgttttaataactataggttgaatacaatgatcatatttttgtttgctgcacaaggtgatctatctctctctctctctctatatatatatatatttcttgttctctaaaaaagaacaacacaagcacataactcctttctcccaaatatcttctttttcttttcctataaaaacttattttttagagcaaaagcattagtgttcacaagtttcgggattcttttgctgcacacgtcggtcgaaaccaactggttgtcgtatcttaggagagggatcattttgctacacacggtcaaaatcaactagtgcttcaacccaggctaaataattatttttcttatttattttttccttatatttattgtatgatatagtcatgtggtgttaattaaaattattttgctattaatatttttttatttaattcaagactttgcattctcttctcatttatttcttttcttttattttaatttttttcaacattttcttcacaattaaacatgtcagactgaattaaaattttgcacctcatctacaccgtctatctaacattcaatcgcacaacagaatcacgtatgaataggaaaataaatggagataatctagaaatatcattattattattgtctaagagctaattacaaaagagaagaaattggccacattaaaattaacttctgggaaggtccatttaatatccaaaaattattcgataacaaaagtaggacaagtgagaaatgttgaagtaaacaaaaaaatttagatagagtcatatctaaatgttggctaagtaagcgtgagtaattatgaacccgtgaaccatccacatgggagtggtgaaggaaggaccacaatatatgagattttcctgcccttgaaagaagaagtagaaaaaaaagaagaaatatacacttaaaaaaatccttttgtaatgaatcatttattaagaaaaataaataaacttaacacaaacccgaaaaagatataataataacctccagatcatctaccattatacatacaaataataaattaaatgacttttcaatggtatttgttactcaaaaagaaaaagaccaataactattggtacacctggtgacccaactaattagtcaaatgaggattatttcctatgaatatcatgatgaagaagaaaaaaagacatgaagagtcatttaatttatgtatgtttactattccatgacaataatgttcaattaatccttttttttattaccaccatgtcttatttcatggacaagctactccggtcaaagaaattttgggtaatggttattctctgaaataataaataaactgttgcatcgtagtcctccacttccaaagatatatgtgaacctcaaatgaaattatgaagattttcgtgaaaggttctttctctttttctagcaagaataaataaaaaaagtaacaattttacaaaattaatcttgtattaaatcttgtttgttatgcaaattgctaatgttagaagtataaatagaaaaaacaattaaaattaatttttacttcgagcacacacttattatgacatgaattctataacaagtgcaagaacatcgaagtcccgggccattctggcccactttgtacaagaaagctgggtgcccggggttaaccttcagcttagaaatgatgtgttttctacacttttctcttcttttttttcttttcatctcacatgaatcaaaaagagaaagcttaattacattaaaggttgatgtgatatttactttctaaatatttgctagaagaaattataatgataacattaaattaagttatagtcatttctatttcggttgtctcccactttctgctatgcttttacaacaacagttcaagatttggaatcgttttctttctccaccaatcgtagtaatacttctttttgtgtttgttgaaattttgcaagattctctcttcctctggttaatacacataacttacttggtaagcttggctgcattttcttttcaagcttttaatcaaagactcactagaaattgcaaaggcaaacataaaattatgtgatcaaactcctactgtgagtttttggttacaaacaaaagttaaaaacaaaagcttgatatttaaaagataaactcaacacatatgcatttgactggcgcacagaagacaattcaagacttgggaaaacagtgagccatcaaaatcgtcagataattcagggaatatattgaatgtggagatgtggtaatcacactattgcacacaaagagtggcaaacaagcggcgcccttggtttggtatagtaagagacaattgttttggactgtttgtgttgccatattcacaaaaatactattgagctatgtatgttaaacattatggtcaatgagtagtagtgaacattcaagtttttttttttttccacttcaagtttttcatcttattattatttttcgttgtgatgcagtagtacggcccatcttcaccagtagtatatcaaagccgaaacagatgacaaattgtttaacatgcacttggattattattgagagttgaaatacaaaggcccgttacaagcccaaacgaaggtacataaaagaaaagcagaaaatgaaaacgaaatcgatagggataagtttttccaactgacggaaacacaaactacaccaggtgaaatagatcacctcccaagtgcatgagacacgaaccaaccacttatcatcagatcacaaaagagctcaaagatctagcgatcgcctaattcagtttgtggccaagctttgatggcaagtcgcaatatctagcgacggccacctcgtgctgctccacataagtctccttgtcggcctcttttatgcgctcgagtctatggtccacgtaatacacgccgggcattttcaagtttttggcaggctttttggagcggtaggtggtcttgaagttacagatgagatggcctccgccgacaagcttcaaggccatgtcggatctaccttcaagaccaccgtcggctgggtaaagcatttcagtattggcttcccagccgagagtcttcttctgcatcacgggaccgtttgatgggaagttcacgccgcggatcttgacgttgtagatcaagcagccgtcttgaagactagtgtcttgggtggcggtcaagactcctccgtcttcgtaggtggtcactctctcccaggtgaatccctctgggaatgactgtttgaagaagtctgggatgccctgggtgtggttgatgaaggttctactcccgtacatgaaggaggtggctagtatgtcgaaggcgaatgggagtggacctccttcgaccaccttgattctcatagtctgggttccctcatagggcttgccctcaccctcagaggtacacttgaagtggtgattattcacggtgccctccatgtataacttcatgtgcatgttctctttaatgagctcctcccccttggacaccatggctgtagagtcaacaatcacaagataaatcagaatcaaaatccatcacgtaatttcaagaagcaatttcgtgaaaaaaaatcctaatctatggccacagaatcaacaaataaggtagttgctaaaggacctgagcaatatctcttgaaataccatacagaatcaacgaataaggcttttatcaacggatctgaacaatttcttgaaaaacgactgaagtatcaacaaataaggctgttgtttaacggatctgaagtagttcatgaaaaaaaccttaatctacgactacagaatcaacaattaaggcttgttgtaaacggatctgaaaatctttatgaaaaaaactctaattagacctaatttacggttataaaatcatcaattaaggacgttcttgcattaataaaagctgaatcttctgattatgaaaatttataatcgatgaaacgatagaaaacacaatcaaatcaacatcatgctgatgtagaacaaacaataaagaagaagaaaaaaaaacggaagaaatctacgaaccttgaaaggagaggtagggaactgcgcaaagagaatgaactaatttgattgcaattgaagtgcgattagggtcgaggggtgtgggggcattttatagcatatgcggtggaaccgttctccaatcatattgtgacgcgtgcccatgtatggtgtgacttggtgtttatgacacagatgatatttcggggagtccttcgtagttgacggtttcgtaatcttgacggagtcagagatgtaccttcaccgcttcacgcttggctttatccgttaccacggcgttattaaattgggcccgcacccgttgcaagttaggaccacagtgtccattacctgaacggtcggctgctaccagtattttacattattaaaatctatggaaaagctgtcacgctagatttttttttttttttttatggataagaaaagactaataggaaagctttcttactccactaaagtctttaataattattttttcaattttcaaataaaatcataatcatcccactaaattctttctcatttgtttttcactttgtaagatattcttccgtagatttttataagtaattctttaagatacatagcataataaattgtatacttttagttacagtctatataaaattagtcatttaaaaaatatagccttaatgatttttttaaaatgaagttatttttttctaatttttctttcttatttattatcgaatgattttttctactaatcgtttagggaagagttttatttttctaatgacgagatgtgttaaatgatgcaacttgaaggcgacatattttttaccaataaaataaaactaaaagatagcttgttgacaaaaacaataattgatgttaaagaaaacgtaagggcaatgggtatcatctaattgttggacaagttgtcttctaaggctaggtaagcttttgttttttattagctgaaatatttatttaattgttctataaataaattttttaaaatgatttttaatgtttttaaatattatttaaaataatttttttaaaattttaacattttagtttttaattattttttatcttacttaaattaattataatttattattttctaccattttatactttccaattaattttatcgaagcattaataccatctggtattttgtcactgcttcgtatgattgtttattaaattttagcttctttcacattggagatgctgggcggtgtgagttacagcatggtgtgaagttaaggtggtttgattatggaacccgaaggtgttggtgcaaggtggataaaattgcttgccaggagatacataaaatgatttacaaaatgaaataaagaataaataaatagtcaagttcaaatttaaatcaaggattagaattatttttccgtacatgatgtaaccgcaatcaccccctgctgaatccagatggccattctggccgaatttaagtgactagggtcaccctgctgaatccagatggccattctggccgaatttaagtgactagggtcacgtgaccctagtcacttaccggattctggccgtaccgagctcgaattcggcccaacttttctatacaaagttgaggtacgagatccgcccatccggccggccagatcctgcaggagatccaagcttggcgcgccgcggacctgaattccagcacactggcggccgttactagtaacggccgccagtgtgctggaattcgcccttcccaagctttgctctagatcaaactcacatccaaacataacatggatatcttccttaccaatcatactaattattttgggttaaatattaatcattatttttaagatattaattaagaaattaaaagattttttaaaaaaatgtataaaattatattattcatgatttttcatacatttgattttgataataaatatattttttttaatttcttaaaaaatgttgcaagacacttattagacatagtcttgttctgtttacaaaagcattcatcatttaatacattaaaaaatatttaatactaacagtagaatcttcttgtgagtggtgtgggagtaggcaacctggcattgaaacgagagaaagagagtcagaaccagaagacaaataaaaagtatgcaacaaacaaatcaaaatcaaagggcaaaggctggggttggctcaattggttgctacattcaattttcaactcagtcaacggttgagattcactctgacttccccaatctaagccgcggatgcaaacggttgaatctaacccacaatccaatctcgttacttaggggcttttccgtcattaactcacccctgccacccggtttccctataaattggaactcaatgctcccctctaaactcgtatcgcttcagagttgagaccaagacacactcgttcatatatctctctgctcttctcttctcttctacctctcaaggtacttttcttctccctctaccaaatcctagattccgtggttcaatttcggatcttgcacttctggtttgctttgccttgctttttcctcaactgggtccatctaggatccatgtgaaactctactctttctttaatatctgcggaatacgcgtttgactttcagatctagtcgaaatcatttcataattgcctttctttcttttagcttatgagaaataaaatcactttttttttatttcaaaataaaccttgggccttgtgctgactgagatggggtttggtgattacagaattttagcgaattttgtaattgtacttgtttgtctgtagttttgttttgttttcttgtttctcatacattccttaggcttcaattttattcgagtataggtcacaataggaattcaaactttgagcaggggaattaatcccttccttcaaatccagtttgtttgtatatatgtttaaaaaatgaaacttttgctttaaattctattataactttttttatggctgaaatttttgcatgtgtctttgctctctgttgtaaatttactgtttaggtactaactctaggcttgttgtgcagtttttgaagtataacaacagaagttcctattccgaagttcctattctctagaaagtataggaacttccaccacacaacacaatggcggccaccgcttccagaaccacccgattctcttcttcctcttcacaccccaccttccccaaacgcattactagatccaccctccctctctctcatcaaaccctcaccaaacccaaccacgctctcaaaatcaaatgttccatctccaaaccccccacggcggcgcccttcaccaaggaagcgccgaccacggagcccttcgtgtcacggttcgcctccggcgaacctcgcaagggcgcggacatccttgtggaggcgctggagaggcagggcgtgacgacggtgttcgcgtaccccggcggtgcgtcgatggagatccaccaggcgctcacgcgctccgccgccatccgcaacgtgctcccgcgccacgagcagggcggcgtcttcgccgccgaaggctacgcgcgttcctccggcctccccggcgtctgcattgccacctccggccccggcgccaccaacctcgtgagcggcctcgccgacgctttaatggacagcgtcccagtcgtcgccatcaccggccaggtcgcccgccggatgatcggcaccgacgccttccaagaaaccccgatcgtggaggtgagcagatccatcacgaagcacaactacctcatcctcgacgtcgacgacatcccccgcgtcgtcgccgaggctttcttcgtcgccacctccggccgccccggtccggtcctcatcgacattcccaaagacgttcagcagcaactcgccgtgcctaattgggacgagcccgttaacctccccggttacctcgccaggctgcccaggccccccgccgaggcccaattggaacacattgtcagactcatcatggaggcccaaaagcccgttctctacgtcggcggtggcagtttgaattccagtgctgaattgaggcgctttgttgaactcactggtattcccgttgctagcactttaatgggtcttggaacttttcctattggtgatgaatattcccttcagatgctgggtatgcatggtactgtttatgctaactatgctgttgacaatagtgatttgttgcttgcctttggggtaaggtttgatgaccgtgttactgggaagcttgaggcttttgctagtagggctaagattgttcacattgatattgattctgccgagattgggaagaacaagcaggcgcacgtgtcggtttgcgcggatttgaagttggccttgaagggaattaatatgattttggaggagaaaggagtggagggtaagtttgatcttggaggttggagagaagagattaatgtgcagaaacacaagtttccattgggttacaagacattccaggacgcgatttctccgcagcatgctatcgaggttcttgatgagttgactaatggagatgctattgttagtactggggttgggcagcatcaaatgtgggctgcgcagttttacaagtacaagagaccgaggcagtggttgacctcagggggtcttggagccatgggttttggattgcctgcggctattggtgctgctgttgctaaccctggggctgttgtggttgacattgatggggatggtagtttcatcatgaatgttcaggagttggccactataagagtggagaatctcccagttaagatattgttgttgaacaatcagcatttgggtatggtggttcagttggaggataggttctacaagtccaatagagctcacacctatcttggagatccgtctagcgagagcgagatattcccaaacatgctcaagtttgctgatgcttgtgggataccggcagcgcgagtgacgaagaaggaagagcttagagcggcaattcagagaatgttggacacccctggcccctaccttcttgatgtcattgtgccccatcaggagcatgtgttgccgatgattcccagtaatggatccttcaaggatgtgataactgagggtgatggtagaacgaggtactgattgcctagaccaaatgttccttgatgcttgttttgtacaatatatataagataatgctgtcctagttgcaggatttggcctgtggtgagcatcatagtctgtagtagttttggtagcaagacattttattttccttttatttaacttactacatgcagtagcatctatctatctctgtagtctgatatctcctgttgtctgtattgtgccgttggattttttgctgtagtgagactgaaaatgatgtgctagtaataatatttctgttagaaatctaagtagagaatctgttgaagaagtcaaaagctaatggaatcaggttacatattcaatgtttttctttttttagcggttggtagacgtgtagattcaacttctcttggagctcacctaggcaatcagtaaaatgcatattccttttttaacttgccatttatttacttttagtggaaattgtgaccaatttgttcatgtagaacggatttggaccattgcgtccacaaaacgtctcttttgctcgatcttcacaaagcgataccgaaatccagagatagttttcaaaagtcagaaatggcaaagttataaatagtaaaacagaatagatgctgtaatcgacttcaataacaagtggcatcacgtttctagttctagacccatcagctgaggtacaaattaattaataagtgactagggtcacgtgaccctagtcacttatgattccgatgacttcgtaggttcctagctcaagccgctcgtgtccaagcgtcacttacgattagctaatgattacggcatctaggaccgactagttcttatgtgcttctagtctccaaatgtggttgatagttattttgctctaagatcaacagtaatgaagtataaatcatcgttgtggtgtgctactcggttaattgagcattaacacacacaaacatgacgaggatggtataatctccaaaaatgtgtactttgttaggtgggaccctatagccttgattaatgtgctatgttaggcatgcctggaaacgtgtgacgcatatgttttgtgaacctgttgatattatatgtgcttttatattaccatattttattaaaatactaatatttattactagtaagatataacattctatctagcttaaaaactaaccataaatattccataataactagatttaccaaactaatatactaaatatacataataaatacaaaattaacaagacaataatcaatatttatgagcttaatatatttagacattatggttggtcgacgataatcatgctaacttttcgtaattgcttgattgaaatatgcttagaataatgcctctttgttctacatggcaaatagggaccattatggtgtaacaccctgggaaccacaaacaccccgaaatgctactaaactacacaactaaccttcatatataaaatttcgacagcatctcctttgaaaatttgcatagacgtggaagcaacagagtataaacagatctagctagctaagtttaaacggccggccatttacaattgaatatatcctgcca

SEQ ID NO: 116 - DNA, 15357 bp, Artificial Sequence
  PHP81343 T-DNA
aattacaacggtatatatcctgtcagccaacaccaaaacatcaaaaaaatcgggatcaggatcaggatctgcggccgcatcctgcaggtttaaacggccggccttcactagctagctgctaagctcaaacgagcaggaagcaacgagagggtggcgcgcgaccgacgtgcgtacgtagcatgagcctgagtggagacgttggacgtgtatgtatatacctctctgcgtgttaactatgtacgtaagcggcaggcagtgcaataagtgtggctctgtagtatgtacgtgcgggtacgatgctgtaagctactgaggcaagtccataaataaataatgacacgtgcgtgttctataatctcttcgcttcttcatttgtccccttgcggagtttggcatccattgatgccgttacgctgagaacagacacagcagacgaaccaaaagtgagttcttgtatgaaactatgacccttcatcgctaggctcaaacagcaccccgtacgaacacagcaaattagtcatctaactattagcccctacatgtttcagacgatacataaatatagcccatccttagcaattagctattggccctgcccatcccaagcaatgatctcgaagtatttttaatatatagtatttttaatatgtagcttttaaaattagaagataattttgagacaaaaatctccaagtatttttttgggtattttttactgcctccgtttttctttatttctcgtcacctagtttaattttgtgctaatcggctataaacgaaacagagagaaaagttactctaaaagcaactccaacagattagatataaatcttatatcctgcctagagctgttaaaaagatagacaactttagtggattagtgtatgcaacaaactctccaaatttaagtatcccaactacccaacgcatatcgttcccttttcattggcgcacgaactttcacctgctatagccgacgtacatgttcgttttttttgggcggcgcttactttcttccccgttcgttctcagcatcgcaactcaatttgttatggcggagaagcccttgtatcccaggtagtaatgcacagatatgcattattattattcataaaatcgagctagttaccctatgaggtgacatgaagcgctcacggttactatgacggttagcttcacgactgttggtggcagtagcgtacgacttagctatagttccggacttacctaactgactagagtcacacttagctgaccctagtcacttaggcgcgccgtcgacggatccgtaccatcaactttgtataataaagttgcccgcggccgccggtacctctgttaatgaacgtaaggagcttctggatgacggctgggacttctttgacaaagagacagagctctaagtgtcttcttttcagtagattatcggtgctagaataaaagagatatgaagggattctgggttctgctctatgtagagtaaagcttggatctttgatctaatctaccgttagtataaaacatctattgagctctcttttatttttcttctcagtgtatagtttgcttattgtttttttggtgtttttttccacctctttgtggtactgacataaacaaagactatcgttttgtcatagaattttgagattttgaagaaaagttggataatttagtatactttttaactgactttataaaacgaattagcttcaattagagcttcacaattctcggattttactgaatgacaagttaacaatttaagctagaaaaaaatatgctctaagcctggacatgttgttagtcatggccagcgtatgtgtacattaggtaaatgaaaacaaaaacaaaaactttgaaggtttctgttaagaaaggaactaatttagcaataagagacatgatattacaagctcaacactgtcgctatatctaccagaagccaacaaatcttccagtgcgtaccattggagccacttttcaggctcattagacaaaagtagcacatataatgtaaagacgaaacgatgataaagagactcacaaggacataatttcaatacagaagaagtttgatgtcattactcattagaaagaaaggtataacacaggaacggaaacatagttgaacaattattcatcaggggctttacaaggccccaaaacacaaaccaccaaagttttaaatgaaacgagacatgaacttcttctgattcataacagagataagtttcctaggtcccaatctagttcagtctcaattccagggaagcgcatggtctgacctcggactgtccatacttccagatagcgccagatcctccgttgatgtggtcctcaccgtgcattggaaagagagggagagtccttctgtgttccaagtaagcatcacctccgcattcctcttcttcttggtgtccctccaagccgaagagaggtttagccctatcgaagaagttgtagggagcggaggagtagtggtgatccatgtttgcccatccgcctccaacgttgttgtagttcatggagcaatcttgctccatagagccgtacacgtgggaagacatgtagccgttggaggcgttgacaactccacattcggttccagaggaggcatggttgagattcccgttgttgaaagaggggtagggcttgttgtggtggtagaggtgatggtcctggttcaacttcacgttgacggagtttgcgggtctttgcataggaactccgtggtggtgatgaagcaaaggatggtagtggtcgttggcggccatcataacagaattgggtgatgaggaaggagtggtcatgttagtcccgttgaaacgcttcttctgcctctcacgagccttgtggttctggaaccagtagaagacgttcttaccctcgatcttaccgaattgacgcaggcgagcggtgatcttctgaatctgatcagcagtaggggagcggatggcattgttgtagtacaactccttcaggatcttgatctgctcagtggtaggtgtccatctggtggaggtctgtctgcaagtgtaccctccggaaccggacttgttgttgttgttgttcccggactcttgatcggcctgatggtggtgatgttggtgctgaggaggctccatggtatgattattgctacggatcttttaaggttccggagagaggattatagtttctcaatctaacaaaaacacaattcaaacacatgtagtatagtacggttctctctcagagaaaaagacacaacaaacatatcaacattttcttttctttctttcttgttttttttaaagaaagtttaattttttttttcttttgacttttttatggagaaaaataacgcagttttggggaaacgcggatttgtaatatcgagaaggatatttggtctggttggtttaatttgtgatgcaaatgtgatcgactgatcgttaaaaaagtgaaaattttgagatgggtcaattttgtttcaaaaattttaatgaaaaaagggtgaaaaattaaagaggtggacaattgtgaaaaaaaaaaaaaagagaaggtaagagagtcaaaagagttgaaagagaaggtgaaaagttaaaagcaccgacctgggcaagagtgaaaggtgatgaagatgatccaaaaaaccctccaacgttgttgttgttccttgctatcatcgaaggcatgtttctcgccggaatcatcataataacggcttgcatacttcacatgcctcaaaaaccaccaccaacaagtatatgtagaattgactctttctctctctatatatatcactttctctctcctaagaggttcttggatagagaaaaagcttaagaagttgagcccttggattttctgtcagatagcaatgtcaaagcgagtaagtgtgtgtgttactacaaaaaaactcagtgatacaaacgtgacctccaagagaaaaaaaagattaaagagaaaaaaacttaatcaaaatttcgaaacaaatatacgctatgcatatatcatatcaaaatatatgaattaaaaagcaaagaaatattgtaacccttatctgatcttgtcttttcgcaaaacaaaatcaaaacttttttaaagaaaatataacacccacgaagatctcggagaaaatcctacaacgcatatcctatatatcaggatatttttctttttttttcttgcagacctaataacgttccttttctcacagccctagctacaagtgactcacctgaaaaatgttagaactcacaaaaaaaaaaaaaaaaattgtaccaaacagtttcattagttagtttcttttttttttctttaaaaaaaaacaatgaccttagacaaccttaacaaaaaaaacatgaatgttacagagattcacgcagtgaccctggttgcgacagaagttttacaaacaagattttttttaacttaccagtgagagtgggagtagaagatgaaggtgtagatctgttttgggttgaaaagagatgaccgttttgaaggaagggtttgggacagttttgaaaaaaaaaatgtttacttatatggtaaaaaagaaaagaaaaagaagctatggcatgaagaggtgttacagagagaaagtgaggagaagaagaagagatagggacaagggcattgaaggaggagagggaagtggggaacaaatggaggaaaatgtggcagcgaagagtaattgcagagcgtattgagagggtgcaattgcatttaatggagggcaaaagaggtgtaattgatagagaggggagagagaaagagacgcagcatatttttggtgtataaaactactaataaattttttgcgagttgacggtgcaatgcaacgaatgacggctaccaaacaaatgctactaaattgctactaagtgctggtatcttgaaattaatttgtgcgtgtcactcccattcatttcttcttctcttttgcagtttttccgatcggataagtatagagtttgtttttttttcccccattaagacaagtgtaattggttcaagaattgaaagagttcttagtattgaaattaaatgttattaatgtgctttaatgtgatttttaatatgtttttaatgtcacttttaatgatgttttatgaatatatatatatatatatatatatatatatatatatatataatattacatattaaaaatcttttagatatgatttttaaagtaattattataaaaataagaatattatcttacatgataaattatacactatttaaaatatatttaacaagatattttaattagtttttaatttttttactagtttaaaaatttggtaaataagtttttatttaacaactctaaggatttttgaaacactaaagttatatttttaaaaatgttagtttttttttgtaactttttatatttattatgttattgttgttgaatatttattagaattttttttaatctattttatataaggaaaaaattcattatttttaactttttatatataatagagttttctcatttttaccattttattatatatgatattgatagtgatatataataaaatagaagttgatatattaaaaagtgttaccttaagtaacgttttaaaaaatgttagaagttattaaaaattttaagttatattttttaaaacactagtttttataactttttgtatttattcttttttgttctttaacatttataagttttcctttttaatcttttttatttaagaaaaaaaaattaacttttttacatatgatagaattttctcatttttaccattttattatatatgatattgatggtgatatataataagtttatgtagatttttttatatttcataaataaaaagctacaaatgtttaaaattaatttaatactaacattataaatattatagttctttttatagaaaaaagtcaaattaaaagttgtataaaaatatgtccatgtaattttatattgttcagttactttaataaataattttatcaaccattttatgatttaataagatatattttcaacattcaactactaattaactttttgactttagttagttttgtcaaaactagtaaaaaaactagctagaagtaggcaagctagttggtaaaccggaaactaaaaaattagtttgttgaagtaggtgaaaaatataaaatgataaaaaaaataataaaatcataatttattttaagaaaagataacaaagaaaataaataaatatattaataataaaattgaaagaaaatataaaaaattagaattcagaaggtaatatcttaaaagaatgttaggtgtttcaaaaaacgttaaaatactactaaaaaactcccgggccattctggcccactttgtacaagaaagctgggtgcccggggttaaccttcagcttagaaatgatgtgttttctacacttttctcttcttttttttcttttcatctcacatgaatcaaaaagagaaagcttaattacattaaaggttgatgtgatatttactttctaaatatttgctagaagaaattataatgataacattaaattaagttatagtcatttctatttcggttgtctcccactttctgctatgcttttacaacaacagttcaagatttggaatcgttttctttctccaccaatcgtagtaatacttctttttgtgtttgttgaaattttgcaagattctctcttcctctggttaatacacataacttacttggtaagcttggctgcattttcttttcaagcttttaatcaaagactcactagaaattgcaaaggcaaacataaaattatgtgatcaaactcctactgtgagtttttggttacaaacaaaagttaaaaacaaaagcttgatatttaaaagataaactcaacacatatgcatttgactggcgcacagaagacaattcaagacttgggaaaacagtgagccatcaaaatcgtcagataattcagggaatatattgaatgtggagatgtggtaatcacactattgcacacaaagagtggcaaacaagcggcgcccttggtttggtatagtaagagacaattgttttggactgtttgtgttgccatattcacaaaaatactattgagctatgtatgttaaacattatggtcaatgagtagtagtgaacattcaagtttttttttttttccacttcaagtttttcatcttattattatttttcgttgtgatgcagtagtacggcccatcttcaccagtagtatatcaaagccgaaacagatgacaaattgtttaacatgcacttggattattattgagagttgaaatacaaaggcccgttacaagcccaaacgaaggtacataaaagaaaagcagaaaatgaaaacgaaatcgatagggataagtttttccaactgacggaaacacaaactacaccaggtgaaatagatcacctcccaagtgcatgagacacgaaccaaccacttatcatcagatcacaaaagagctcaaagatctagcgatcgcctaattcagtttgtggccaagctttgatggcaagtcgcaatatctagcgacggccacctcgtgctgctccacataagtctccttgtcggcctcttttatgcgctcgagtctatggtccacgtaatacacgccgggcattttcaagtttttggcaggctttttggagcggtaggtggtcttgaagttacagatgagatggcctccgccgacaagcttcaaggccatgtcggatctaccttcaagaccaccgtcggctgggtaaagcatttcagtattggcttcccagccgagagtcttcttctgcatcacgggaccgtttgatgggaagttcacgccgcggatcttgacgttgtagatcaagcagccgtcttgaagactagtgtcttgggtggcggtcaagactcctccgtcttcgtaggtggtcactctctcccaggtgaatccctctgggaatgactgtttgaagaagtctgggatgccctgggtgtggttgatgaaggttctactcccgtacatgaaggaggtggctagtatgtcgaaggcgaatgggagtggacctccttcgaccaccttgattctcatagtctgggttccctcatagggcttgccctcaccctcagaggtacacttgaagtggtgattattcacggtgccctccatgtataacttcatgtgcatgttctctttaatgagctcctcccccttggacaccatggctgtagagtcaacaatcacaagataaatcagaatcaaaatccatcacgtaatttcaagaagcaatttcgtgaaaaaaaatcctaatctatggccacagaatcaacaaataaggtagttgctaaaggacctgagcaatatctcttgaaataccatacagaatcaacgaataaggcttttatcaacggatctgaacaatttcttgaaaaacgactgaagtatcaacaaataaggctgttgtttaacggatctgaagtagttcatgaaaaaaaccttaatctacgactacagaatcaacaattaaggcttgttgtaaacggatctgaaaatctttatgaaaaaaactctaattagacctaatttacggttataaaatcatcaattaaggacgttcttgcattaataaaagctgaatcttctgattatgaaaatttataatcgatgaaacgatagaaaacacaatcaaatcaacatcatgctgatgtagaacaaacaataaagaagaagaaaaaaaaacggaagaaatctacgaaccttgaaaggagaggtagggaactgcgcaaagagaatgaactaatttgattgcaattgaagtgcgattagggtcgaggggtgtgggggcattttatagcatatgcggtggaaccgttctccaatcatattgtgacgcgtgcccatgtatggtgtgacttggtgtttatgacacagatgatatttcggggagtccttcgtagttgacggtttcgtaatcttgacggagtcagagatgtaccttcaccgcttcacgcttggctttatccgttaccacggcgttattaaattgggcccgcacccgttgcaagttaggaccacagtgtccattacctgaacggtcggctgctaccagtattttacattattaaaatctatggaaaagctgtcacgctagatttttttttttttttttatggataagaaaagactaataggaaagctttcttactccactaaagtctttaataattattttttcaattttcaaataaaatcataatcatcccactaaattctttctcatttgtttttcactttgtaagatattcttccgtagatttttataagtaattctttaagatacatagcataataaattgtatacttttagttacagtctatataaaattagtcatttaaaaaatatagccttaatgatttttttaaaatgaagttatttttttctaatttttctttcttatttattatcgaatgattttttctactaatcgtttagggaagagttttatttttctaatgacgagatgtgttaaatgatgcaacttgaaggcgacatattttttaccaataaaataaaactaaaagatagcttgttgacaaaaacaataattgatgttaaagaaaacgtaagggcaatgggtatcatctaattgttggacaagttgtcttctaaggctaggtaagcttttgttttttattagctgaaatatttatttaattgttctataaataaattttttaaaatgatttttaatgtttttaaatattatttaaaataatttttttaaaattttaacattttagtttttaattattttttatcttacttaaattaattataatttattattttctaccattttatactttccaattaattttatcgaagcattaataccatctggtattttgtcactgcttcgtatgattgtttattaaattttagcttctttcacattggagatgctgggcggtgtgagttacagcatggtgtgaagttaaggtggtttgattatggaacccgaaggtgttggtgcaaggtggataaaattgcttgccaggagatacataaaatgatttacaaaatgaaataaagaataaataaatagtcaagttcaaatttaaatcaaggattagaattatttttccgtacatgatgtaaccgcaatcaccccctgctgaatccagatggccattctggccgaatttaagtgactagggtcaccctgctgaatccagatggccattctggccgaatttaagtgactagggtcacgtgaccctagtcacttaccggattctggccgtaccgagctcgaattcggcccaacttttctatacaaagttgaggtacgagatccgcccatccggccggccagatcctgcaggagatccaagcttggcgcgccgcggacctgaattccagcacactggcggccgttactagtaacggccgccagtgtgctggaattcgcccttcccaagctttgctctagatcaaactcacatccaaacataacatggatatcttccttaccaatcatactaattattttgggttaaatattaatcattatttttaagatattaattaagaaattaaaagattttttaaaaaaatgtataaaattatattattcatgatttttcatacatttgattttgataataaatatattttttttaatttcttaaaaaatgttgcaagacacttattagacatagtcttgttctgtttacaaaagcattcatcatttaatacattaaaaaatatttaatactaacagtagaatcttcttgtgagtggtgtgggagtaggcaacctggcattgaaacgagagaaagagagtcagaaccagaagacaaataaaaagtatgcaacaaacaaatcaaaatcaaagggcaaaggctggggttggctcaattggttgctacattcaattttcaactcagtcaacggttgagattcactctgacttccccaatctaagccgcggatgcaaacggttgaatctaacccacaatccaatctcgttacttaggggcttttccgtcattaactcacccctgccacccggtttccctataaattggaactcaatgctcccctctaaactcgtatcgcttcagagttgagaccaagacacactcgttcatatatctctctgctcttctcttctcttctacctctcaaggtacttttcttctccctctaccaaatcctagattccgtggttcaatttcggatcttgcacttctggtttgctttgccttgctttttcctcaactgggtccatctaggatccatgtgaaactctactctttctttaatatctgcggaatacgcgtttgactttcagatctagtcgaaatcatttcataattgcctttctttcttttagcttatgagaaataaaatcactttttttttatttcaaaataaaccttgggccttgtgctgactgagatggggtttggtgattacagaattttagcgaattttgtaattgtacttgtttgtctgtagttttgttttgttttcttgtttctcatacattccttaggcttcaattttattcgagtataggtcacaataggaattcaaactttgagcaggggaattaatcccttccttcaaatccagtttgtttgtatatatgtttaaaaaatgaaacttttgctttaaattctattataactttttttatggctgaaatttttgcatgtgtctttgctctctgttgtaaatttactgtttaggtactaactctaggcttgttgtgcagtttttgaagtataacaacagaagttcctattccgaagttcctattctctagaaagtataggaacttccaccacacaacacaatggcggccaccgcttccagaaccacccgattctcttcttcctcttcacaccccaccttccccaaacgcattactagatccaccctccctctctctcatcaaaccctcaccaaacccaaccacgctctcaaaatcaaatgttccatctccaaaccccccacggcggcgcccttcaccaaggaagcgccgaccacggagcccttcgtgtcacggttcgcctccggcgaacctcgcaagggcgcggacatccttgtggaggcgctggagaggcagggcgtgacgacggtgttcgcgtaccccggcggtgcgtcgatggagatccaccaggcgctcacgcgctccgccgccatccgcaacgtgctcccgcgccacgagcagggcggcgtcttcgccgccgaaggctacgcgcgttcctccggcctccccggcgtctgcattgccacctccggccccggcgccaccaacctcgtgagcggcctcgccgacgctttaatggacagcgtcccagtcgtcgccatcaccggccaggtcgcccgccggatgatcggcaccgacgccttccaagaaaccccgatcgtggaggtgagcagatccatcacgaagcacaactacctcatcctcgacgtcgacgacatcccccgcgtcgtcgccgaggctttcttcgtcgccacctccggccgccccggtccggtcctcatcgacattcccaaagacgttcagcagcaactcgccgtgcctaattgggacgagcccgttaacctccccggttacctcgccaggctgcccaggccccccgccgaggcccaattggaacacattgtcagactcatcatggaggcccaaaagcccgttctctacgtcggcggtggcagtttgaattccagtgctgaattgaggcgctttgttgaactcactggtattcccgttgctagcactttaatgggtcttggaacttttcctattggtgatgaatattcccttcagatgctgggtatgcatggtactgtttatgctaactatgctgttgacaatagtgatttgttgcttgcctttggggtaaggtttgatgaccgtgttactgggaagcttgaggcttttgctagtagggctaagattgttcacattgatattgattctgccgagattgggaagaacaagcaggcgcacgtgtcggtttgcgcggatttgaagttggccttgaagggaattaatatgattttggaggagaaaggagtggagggtaagtttgatcttggaggttggagagaagagattaatgtgcagaaacacaagtttccattgggttacaagacattccaggacgcgatttctccgcagcatgctatcgaggttcttgatgagttgactaatggagatgctattgttagtactggggttgggcagcatcaaatgtgggctgcgcagttttacaagtacaagagaccgaggcagtggttgacctcagggggtcttggagccatgggttttggattgcctgcggctattggtgctgctgttgctaaccctggggctgttgtggttgacattgatggggatggtagtttcatcatgaatgttcaggagttggccactataagagtggagaatctcccagttaagatattgttgttgaacaatcagcatttgggtatggtggttcagttggaggataggttctacaagtccaatagagctcacacctatcttggagatccgtctagcgagagcgagatattcccaaacatgctcaagtttgctgatgcttgtgggataccggcagcgcgagtgacgaagaaggaagagcttagagcggcaattcagagaatgttggacacccctggcccctaccttcttgatgtcattgtgccccatcaggagcatgtgttgccgatgattcccagtaatggatccttcaaggatgtgataactgagggtgatggtagaacgaggtactgattgcctagaccaaatgttccttgatgcttgttttgtacaatatatataagataatgctgtcctagttgcaggatttggcctgtggtgagcatcatagtctgtagtagttttggtagcaagacattttattttccttttatttaacttactacatgcagtagcatctatctatctctgtagtctgatatctcctgttgtctgtattgtgccgttggattttttgctgtagtgagactgaaaatgatgtgctagtaataatatttctgttagaaatctaagtagagaatctgttgaagaagtcaaaagctaatggaatcaggttacatattcaatgtttttctttttttagcggttggtagacgtgtagattcaacttctcttggagctcacctaggcaatcagtaaaatgcatattccttttttaacttgccatttatttacttttagtggaaattgtgaccaatttgttcatgtagaacggatttggaccattgcgtccacaaaacgtctcttttgctcgatcttcacaaagcgataccgaaatccagagatagttttcaaaagtcagaaatggcaaagttataaatagtaaaacagaatagatgctgtaatcgacttcaataacaagtggcatcacgtttctagttctagacccatcagctgaggtacaaattaattaataagtgactagggtcacgtgaccctagtcacttatgattccgatgacttcgtaggttcctagctcaagccgctcgtgtccaagcgtcacttacgattagctaatgattacggcatctaggaccgactagttcttatgtgcttctagtctccaaatgtggttgatagttattttgctctaagatcaacagtaatgaagtataaatcatcgttgtggtgtgctactcggttaattgagcattaacacacacaaacatgacgaggatggtataatctccaaaaatgtgtactttgttaggtgggaccctatagccttgattaatgtgctatgttaggcatgcctggaaacgtgtgacgcatatgttttgtgaacctgttgatattatatgtgcttttatattaccatattttattaaaatactaatatttattactagtaagatataacattctatctagcttaaaaactaaccataaatattccataataactagatttaccaaactaatatactaaatatacataataaatacaaaattaacaagacaataatcaatatttatgagcttaatatatttagacattatggttggtcgacgataatcatgctaacttttcgtaattgcttgattgaaatatgcttagaataatgcctctttgttctacatggcaaatagggaccattatggtgtaacaccctgggaaccacaaacaccccgaaatgctactaaactacacaactaaccttcatatataaaatttcgacagcatctcctttgaaaatttgcatagacgtggaagcaacagagtataaacagatctagctagctaagtttaaacggccggccatttacaattgaatatatcctgcca

SEQ ID NO: 117 - DNA, 9769 bp, Artificial Sequence
  plasmid QC318
tttgtacaaacttgtgattcttccttaccaatcatactaattattttgggttaaatattaatcattatttttaagatattaattaagaaattaaaagattttttaaaaaaatgtataaaattatattattcatgatttttcatacatttgattttgataataaatatattttttttaatttcttaaaaaatgttgcaagacacttattagacatagtcttgttctgtttacaaaagcattcatcatttaatacattaaaaaatatttaatactaacagtagaatcttcttgtgagtggtgtgggagtaggcaacctggcattgaaacgagagaaagagagtcagaaccagaagacaaataaaaagtatgcaacaaacaaatcaaaatcaaagggcaaaggctggggttggctcaattggttgctacattcaattttcaactcagtcaacggttgagattcactctgacttccccaatctaagccgcggatgcaaacggttgaatctaacccacaatccaatctcgttacttaggggcttttccgtcattaactcacccctgccacccggtttccctataaattggaactcaatgctcccctctaaactcgtatcgcttcagagttgagaccaagacacactcgttcatatatctctctgctcttctcttctcttctacctctcaaggtacttttcttctccctctaccaaatcctagattccgtggttcaatttcggatcttgcacttctggtttgctttgccttgctttttcctcaactgggtccatctaggatccatgtgaaactctactctttctttaatatctgcggaatacgcgtttgactttcagatctagtcgaaatcatttcataattgcctttctttcttttagcttatgagaaataaaatcactttttttttatttcaaaataaaccttgggccttgtgctgactgagatggggtttggtgattacagaattttagcgaattttgtaattgtacttgtttgtctgtagttttgttttgttttcttgtttctcatacattccttaggcttcaattttattcgagtataggtcacaataggaattcaaactttgagcaggggaattaatcccttccttcaaatccagtttgtttgtatatatgtttaaaaaatgaaacttttgctttaaattctattataactttttttatggctgaaatttttgcatgtgtctttgctctctgttgtaaatttactgtttaggtactaactctaggcttgttgtgcagtttttgaagtataaccatgccacacaacacaatggcggccaccgcttccagaaccacccgattctcttcttcctcttcacaccccaccttccccaaacgcattactagatccaccctccctctctctcatcaaaccctcaccaaacccaaccacgctctcaaaatcaaatgttccatctccaaaccccccacggcggcgcccttcaccaaggaagcgccgaccacggagcccttcgtgtcacggttcgcctccggcgaacctcgcaagggcgcggacatccttgtggaggcgctggagaggcagggcgtgacgacggtgttcgcgtaccccggcggtgcgtcgatggagatccaccaggcgctcacgcgctccgccgccatccgcaacgtgctcccgcgccacgagcagggcggcgtcttcgccgccgaaggctacgcgcgttcctccggcctccccggcgtctgcattgccacctccggccccggcgccaccaacctcgtgagcggcctcgccgacgctttaatggacagcgtcccagtcgtcgccatcaccggccaggtcgcccgccggatgatcggcaccgacgccttccaagaaaccccgatcgtggaggtgagcagatccatcacgaagcacaactacctcatcctcgacgtcgacgacatcccccgcgtcgtcgccgaggctttcttcgtcgccacctccggccgccccggtccggtcctcatcgacattcccaaagacgttcagcagcaactcgccgtgcctaattgggacgagcccgttaacctccccggttacctcgccaggctgcccaggccccccgccgaggcccaattggaacacattgtcagactcatcatggaggcccaaaagcccgttctctacgtcggcggtggcagtttgaattccagtgctgaattgaggcgctttgttgaactcactggtattcccgttgctagcactttaatgggtcttggaacttttcctattggtgatgaatattcccttcagatgctgggtatgcatggtactgtttatgctaactatgctgttgacaatagtgatttgttgcttgcctttggggtaaggtttgatgaccgtgttactgggaagcttgaggcttttgctagtagggctaagattgttcacattgatattgattctgccgagattgggaagaacaagcaggcgcacgtgtcggtttgcgcggatttgaagttggccttgaagggaattaatatgattttggaggagaaaggagtggagggtaagtttgatcttggaggttggagagaagagattaatgtgcagaaacacaagtttccattgggttacaagacattccaggacgcgatttctccgcagcatgctatcgaggttcttgatgagttgactaatggagatgctattgttagtactggggttgggcagcatcaaatgtgggctgcgcagttttacaagtacaagagaccgaggcagtggttgacctcagggggtcttggagccatgggttttggattgcctgcggctattggtgctgctgttgctaaccctggggctgttgtggttgacattgatggggatggtagtttcatcatgaatgttcaggagttggccactataagagtggagaatctcccagttaagatattgttgttgaacaatcagcatttgggtatggtggttcagttggaggataggttctacaagtccaatagagctcacacctatcttggagatccgtctagcgagagcgagatattcccaaacatgctcaagtttgctgatgcttgtgggataccggcagcgcgagtgacgaagaaggaagagcttagagcggcaattcagagaatgttggacacccctggcccctaccttcttgatgtcattgtgccccatcaggagcatgtgttgccgatgattcccagtaatggatccttcaaggatgtgataactgagggtgatggtagaacgaggtactgattgcctagaccaaatgttccttgatgcttgttttgtacaatatatataagataatgctgtcctagttgcaggatttggcctgtggtgagcatcatagtctgtagtagttttggtagcaagacattttattttccttttatttaacttactacatgcagtagcatctatctatctctgtagtctgatatctcctgttgtctgtattgtgccgttggattttttgctgtagtgagactgaaaatgatgtgctagtaataatatttctgttagaaatctaagtagagaatctgttgaagaagtcaaaagctaatggaatcaggttacatattcaatgtttttctttttttagcggttggtagacgtgtagattcaacttctcttggagctcacctaggcaatcagtaaaatgcatattccttttttaacttgccatttatttacttttagtggaaattgtgaccaatttgttcatgtagaacggatttggaccattgcgtccacaaaacgtctcttttgctcgatcttcacaaagcgataccgaaatccagagatagttttcaaaagtcagaaatggcaaagttataaatagtaaaacagaatagatgctgtaatcgacttcaataacaagtggcatcacgtttctagttctagacccgggtaccggcgcgcccgatcatccggatatagttcctcctttcagcaaaaaacccctcaagacccgtttagaggccccaaggggttatgctagttattgctcagcggtggcagcagccaactcagcttcctttcgggctttgttagcagccggatcgatccaagctgtacctcactattcctttgccctcggacgagtgctggggcgtcggtttccactatcggcgagtacttctacacagccatcggtccagacggccgcgcttctgcgggcgatttgtgtacgcccgacagtcccggctccggatcggacgattgcgtcgcatcgaccctgcgcccaagctgcatcatcgaaattgccgtcaaccaagctctgatagagttggtcaagaccaatgcggagcatatacgcccggagccgcggcgatcctgcaagctccggatgcctccgctcgaagtagcgcgtctgctgctccatacaagccaaccacggcctccagaagaagatgttggcgacctcgtattgggaatccccgaacatcgcctcgctccagtcaatgaccgctgttatgcggccattgtccgtcaggacattgttggagccgaaatccgcgtgcacgaggtgccggacttcggggcagtcctcggcccaaagcatcagctcatcgagagcctgcgcgacggacgcactgacggtgtcgtccatcacagtttgccagtgatacacatggggatcagcaatcgcgcatatgaaatcacgccatgtagtgtattgaccgattccttgcggtccgaatgggccgaacccgctcgtctggctaagatcggccgcagcgatcgcatccatagcctccgcgaccggctgcagaacagcgggcagttcggtttcaggcaggtcttgcaacgtgacaccctgtgcacggcgggagatgcaataggtcaggctctcgctgaattccccaatgtcaagcacttccggaatcgggagcgcggccgatgcaaagtgccgataaacataacgatctttgtagaaaccatcggcgcagctatttacccgcaggacatatccacgccctcctacatcgaagctgaaagcacgagattcttcgccctccgagagctgcatcaggtcggagacgctgtcgaacttttcgatcagaaacttctcgacagacgtcgcggtgagttcaggcttttccatgggtatatctccttcttaaagttaaacaaaattatttctagagggaaaccgttgtggtctccctatagtgagtcgtattaatttcgcgggatcgagatctgatcaacctgcattaatgaatcggccaacgcgcggggagaggcggtttgcgtattgggcgctcttccgcttcctcgctcactgactcgctgcgctcggtcgttcggctgcggcgagcggtatcagctcactcaaaggcggtaatacggttatccacagaatcaggggataacgcaggaaagaacatgtgagcaaaaggccagcaaaaggccaggaaccgtaaaaaggccgcgttgctggcgtttttccataggctccgcccccctgacgagcatcacaaaaatcgacgctcaagtcagaggtggcgaaacccgacaggactataaagataccaggcgtttccccctggaagctccctcgtgcgctctcctgttccgaccctgccgcttaccggatacctgtccgcctttctcccttcgggaagcgtggcgctttctcaatgctcacgctgtaggtatctcagttcggtgtaggtcgttcgctccaagctgggctgtgtgcacgaaccccccgttcagcccgaccgctgcgccttatccggtaactatcgtcttgagtccaacccggtaagacacgacttatcgccactggcagcagccactggtaacaggattagcagagcgaggtatgtaggcggtgctacagagttcttgaagtggtggcctaactacggctacactagaaggacagtatttggtatctgcgctctgctgaagccagttaccttcggaaaaagagttggtagctcttgatccggcaaacaaaccaccgctggtagcggtggtttttttgtttgcaagcagcagattacgcgcagaaaaaaaggatctcaagaagatcctttgatcttttctacggggtctgacgctcagtggaacgaaaactcacgttaagggattttggtcatgacattaacctataaaaataggcgtatcacgaggccctttcgtctcgcgcgtttcggtgatgacggtgaaaacctctgacacatgcagctcccggagacggtcacagcttgtctgtaagcggatgccgggagcagacaagcccgtcagggcgcgtcagcgggtgttggcgggtgtcggggctggcttaactatgcggcatcagagcagattgtactgagagtgcaccatatggacatattgtcgttagaacgcggctacaattaatacataaccttatgtatcatacacatacgatttaggtgacactatagaacggcgcgccggtaccgggccccccctcgagtgcggccgcaagcttgtcgacggagatcaccactttgtacaagaaagctgggtctagatatctcgacccgggcaatcaaattatatatgtaaagcaattacagtttatcaaactttatttatggaaataatttattatcacatttattttggtttataaattttaaattaaaatatcacctaaataaaaataatttttaacatgacttattgtcctaaataaattatttccgtaaattaaataaaatgaagtttttttctttcaaagaatctaaatggtcataatgagaattctctaaaaaaatacataatgagaataattatggaatttatttattaataaaaattaatagcattttgatagacaattaataaaattttaaaaataaccatatagaaataataatttttttactatcggttccaattaaaataatgataaaaaataaaatagattattaattgatattgatatgaaatttaaataaagaatataatcatatattttattgatatatgatatgatatagattaattgatattgattttgatatggaatttaaaaataatataataattgtttttatttattaatacgtgtaatcaaataattctcactttttgaatcaatcagtgtacttaaagataatatcagttgaatattttttatccttttacgtgtgctgtgagacattatcatcaattgtgttgtatatgatatatagatatagatatataaatatatagattgagtgatataatatatttaaaatataaattatatatatgttttaatatatttttgcatatatatatatatttgtaaaaactagaagtattttttcatgagataattattatcgagttgaataagtctattatttgtgagagccaaccatatttatatatgtgattaaattttatctttgtgaaattaaaaataataaaaaataccttaaaatcataataatagaaaaacttatatttataatttaccattatacttaaaaaaaattaaataaatattataaatataaatactatcgagtaatggccgcgctagggtttttgagaaaaaatcttcccacgcactcaactgcactgtacggcgtcgttttcacagccgcataatagaagccgcgttccccaacccttcctcacaacattctcggaccctccagcaccgtcacccaaacaaatatccacgcggtagtaggcgcgtgaaacaaactctaatccgaactacgagacgtgagaagcacgcgctttagcgagcgtttcaattgtcgctacgaaagcagagaaggatacaaacggaactagggtaaattagtaagggtaatttcgtaaacagaagaaaagagttgtagctataaataaaccctctaaccctcgtcgcattacttctcttcacacctttgttcactcttcttctcttgcggctagggttttagcgcagcttcttctaggttcgttatctaccaccgttctatggattttattccttctattcgtgtttattctattggtttatgttgcttgcaatatgttttttctgaatctgtcgtcgttgtcttcaattttatccatgtttcagagatcaattttgtttgtgtagtatgtgcttattcttcttcttttcgttcgagttgttaataacggtgctatggtgttttcaaaagtgttttttttattacttttgatttaaagtttttttggtaaggcttttatttgcttgttatattcaaatctttggatccagatcttatataagtttttggttcaagaaagtttttggttactgatgaatagatctattaactgttactttaatcgattcaagctaaagttttttggttactgatgaatagatctattatctgttacttttaatcggttcaagctcaagttttttggttactgatgaatagatctatatacgtcacagtgtgctaaacatgcccttgttttatctcgatcttatgtatgggagtgccataaattttgttatgtctatttttttatctgttggaatcatactgagtttgatgcgttacgattgagcatacctatttttgggcttgttgtatggtgggtatttagatcttaatctttttatgcttatgaaaggttttgtaatgacaaaggtcttaatgttgttaaacttttatttttactttatatggtgtgttgatgtgttatggttttgacaactttttttttttctggatttttgcagatttaaggaagccatggcccacagcaagcacggcctgaaggaggagatgaccatgaagtaccacatggagggctgcgtgaacggccacaagttcgtgatcaccggcgagggcatcggctaccccttcaagggcaagcagaccatcaacctgtgcgtgatcgagggcggccccctgcccttcagcgaggacatcctgagcgccggcttcaagtacggcgaccggatcttcaccgagtacccccaggacatcgtggactacttcaagaacagctgccccgccggctacacctggggccggagcttcctgttcgaggacggcgccgtgtgcatctgtaacgtggacatcaccgtgagcgtgaaggagaactgcatctaccacaagagcatcttcaacggcgtgaacttccccgccgacggccccgtgatgaagaagatgaccaccaactgggaggccagctgcgagaagatcatgcccgtgcctaagcagggcatcctgaagggcgacgtgagcatgtacctgctgctgaaggacggcggccggtaccggtgccagttcgacaccgtgtacaaggccaagagcgtgcccagcaagatgcccgagtggcacttcatccagcacaagctgctgcgggaggaccggagcgacgccaagaaccagaagtggcagctgaccgagcacgccatcgccttccccagcgccctggcctgagagctcgaatttccccgatcgttcaaacatttggcaataaagtttcttaagattgaatcctgttgccggtcttgcgatgattatcatataatttctgttgaattacgttaagcatgtaataattaacatgtaatgcatgacgttatttatgagatgggtttttatgattagagtcccgcaattatacatttaatacgcgatagaaaacaaaatatagcgcgcaaactaggataaattatcgcgcgcggtgtcatctatgttactagatcgggaattctagtggccggcccagctgatatccatcacactggcggccgcactcgactgaattggttccggcgccagcctgcttt

SEQ ID NO: 118 - DNA, 6538 bp, Artificial Sequence
  plasmid pVER9662
ccgagatagggttgagtgttgttccagtttggaacaagagtccactattaaagaacgtggactccaacgtcaaagggcgaaaaaccgtctatcagggcgatggcccactacgtgaaccatcacccaaatcaagttttttggggtcgaggtgccgtaaagcactaaatcggaaccctaaagggagcccccgatttagagcttgacggggaaagccggcgaacgtggcgagaaaggaagggaagaaagcgaaaggagcgggcgctagggcgctggcaagtgtagcggtcacgctgcgcgtaaccaccacacccgccgcgcttaatgcgccgctacagggcgcgtactatggttgctttgacgtatgcggtgtgaaataccgcacagatgcgtaaggagaaaataccgcatcaggcgccattcgccattcaggctgcgcaactgttgggaagggcgatcggtgcgggcctcttcgctattacgccagctggcgaaagggggatgtgctgcaaggcgattaagttgggtaacgccagggttttcccagtcacgacgttgtaaaacgacggccagtgccaagcttaaggtgcacggccctacaggtcactaataccatctaagtagttggttcatagtgactgcatatgttgtgttttacagtattatgtagtctgttttttatgcaaaatctaatttaatatattgatatttatatcattttacgtttctcgttcaactttcttgtacaaagtggccgttaacggatctggccgcggccgcatcaggatattcttgtttaagatgttgaactctatggaggtttgtatgaactgatgatctaggaccggataagttcccttcttcatagcgaacttattcaaagaatgttttgtgtatcattcttgttacattgttattaatgaaaaaatattattggtcattggactgaacacgagtgttaaatatggaccaggccccaaataagatccattgatatatgaattaaataacaagaataaatcgagtcaccaaaccacttgccttttttaacgagacttgttcaccaacttgatacaaaagtcattatcctatgcaaatcaataatcatacaaaaatatccaataacactaaaaaattaaaagaaatggataatttcacaatatgttatacgataaagaagttacttttccaagaaattcactgattttataagcccacttgcattagataaatggcaaaaaaaaacaaaaaggaaaagaaataaagcacgaagaattctagaaaatacgaaatacgcttcaatgcagtgggacccacggttcaattattgccaattttcagctccaccgtatatttaaaaaataaaacgataatgctaaaaaaatataaatcgtaacgatcgttaaatctcaacggctggatcttatgacgaccgttagaaattgtggttgtcgacgagtcagtaataaacggcgtcaaagtggttgcagccggcacacacgagtcgtgtttatcaactcaaagcacaaatacttttcctcaacctaaaaataaggcaattagccaaaaacaactttgcgtgtaaacaacgctcaatacacgtgtcattttattattagctattgcttcaccgccttagctttctcgtgacctagtcgtcctcgtcttttcttcttcttcttctataaaacaatacccaaagagctcttcttcttcacaattcagatttcaatttctcaaaatcttaaaaactttctctcaattctctctaccgtgatcaaggtaaatttctgtgttccttattctctcaaaatcttcgattttgttttcgttcgatcccaatttcgtatatgttctttggtttagattctgttaatcttagatcgaagacgattttctgggtttgatcgttagatatcatcttaattctcgattagggtttcatagatatcatccgatttgttcaaataatttgagttttgtcgaataattactcttcgatttgtgatttctatctagatctggtgttagtttctagtttgtgcgatcgaatttgtcgattaatctgagtttttctgattaacagccatggagcctcctcagcaccaacatcaccaccatcaggccgatcaagagtccgggaacaacaacaacaacaagtccggttccggagggtacacttgcagacagacctccaccagatggacacctaccactgagcagatcaagatcctgaaggagttgtactacaacaatgccatccgctcccctactgctgatcagattcagaagatcaccgctcgcctgcgtcaattcggtaagatcgagggtaagaacgtcttctactggttccagaaccacaaggctcgtgagaggcagaagaagcgtttcaacgggactaacatgaccactccttcctcatcacccaattctgttatgatggccgccaacgaccactaccatcctttgcttcatcaccaccacggagttcctatgcaaagacccgcaaactccgtcaacgtgaagttgaaccaggaccatcacctctaccaccacaacaagccctacccctctttcaacaacgggaatctcaaccatgcctcctctggaaccgaatgtggagttgtcaacgcctccaacggctacatgtcttcccacgtgtacggctctatggagcaagattgctccatgaactacaacaacgttggaggcggatgggcaaacatggatcaccactactcctccgctccctacaacttcttcgatagggctaaacctctcttcggcttggagggacaccaagaagaagaggaatgcggaggtgatgcttacttggaacacagaaggactctccctctctttccaatgcacggtgaggaccacatcaacggaggatctggcgctatctggaagtatggacagtccgaggtcagaccatgcgcttccctggaattgagactgaactagattgggacctaggaaacttatctctgttatgaatcagaagaagttcatgtctcgtttcatttaaaactttggtggtttgtgttttggggccttgtaaagcccctgatgaataattgttcaactatgtttccgttcctgtgttatacctttctttctaatgagtaatgacatcaaacttcttctgtattgaaattatgtccttgtgagtctctttatcatcgtttcgtctttacattatatgtgctacttttgtctaatgagcctgaaaagtggctccaatggtacgcactggaagatttgttggcttctggtagatatagcgacagtgttgagcttgtaatatcatgtctcttattgctaaattagttcctttcttaacagaaaccttcaaagtttttgtttttgttttcatttacctaatgtacacatacgctggccatgactaacaacatgtccaggcttagagcatatttttttctagcttaaattgttaacttgtcattcagtaaaatccgagaattgtgaagctctaattgaagctaattcgttttataaagtcagttaaaaagtatactaaattatccaacttttcttcaaaatctcaaaattctatgacaaaacgatagtctttgtttatgtcagtaccacaaagaggtggaaaaaaacaccaaaaaaacaataagcaaactatacactgagaagaaaaataaaagagagctcaatagatgttttatactaacggtagattagatcaaagatccaagctttactctacatagagcagaacccagaatcccttcatatctcttttattctagcaccgataatctactgaaaagaagacacttagagctctgtctctttgtcaaagaagtcccagccgtcatccagaagctccttacgttcattaacagaggtaccggcggccgcgggcaactttattatacaaagttggcattataaaaaagcattgcttatcaatttgttgcaacgaacaggtcactatcagtcaaaataaaatcattatttggagctcccaattcgtaatcatggtcatagctgtttcctgtgtgaaattgttatccgctcacaattccacacaacatacgagccggaagcataaagtgtaaagcctggggtgcctaatgagtgagctaactcacattaattgcgttgcgctcactgcccgctttccagtcgggaaacctgtcgtgccagctgcattaatgaatcggccaacgcgcggggagaggcggtttgcgtattgggcgctcttccgcttcctcgctcactgactcgctgcgctcggtcgttcggctgcggcgagcggtatcagctcactcaaaggcggtaatacggttatccacagaatcaggggataacgcaggaaagaacatgtgagcaaaaggccagcaaaaggccaggaaccgtaaaaaggccgcgttgctggcgtttttccataggctccgcccccctgacgagcatcacaaaaatcgacgctcaagtcagaggtggcgaaacccgacaggactataaagataccaggcgtttccccctggaagctccctcgtgcgctctcctgttccgaccctgccgcttaccggatacctgtccgcctttctcccttcgggaagcgtggcgctttctcatagctcacgctgtaggtatctcagttcggtgtaggtcgttcgctccaagctgggctgtgtgcacgaaccccccgttcagcccgaccgctgcgccttatccggtaactatcgtcttgagtccaacccggtaagacacgacttatcgccactggcagcagccactggtaacaggattagcagagcgaggtatgtaggcggtgctacagagttcttgaagtggtggcctaactacggctacactagaagaacagtatttggtatctgcgctctgctgaagccagttaccttcggaaaaagagttggtagctcttgatccggcaaacaaaccaccgctggtagcggtggtttttttgtttgcaagcagcagattacgcgcagaaaaaaaggatctcaagaagatcctttgatcttttctacggggtctgacgctcagtggaacgaaaactcacgttaagggattttggtcatgagattatcaaaaaggatcttcacctagatccttttaaattaaaaatgaagttttaaatcaatctaaagtatatatgagtaaacttggtctgacagttaccaatgcttaatcagtgaggcacctatctcagcgatctgtctatttcgttcatccatagttgcctgactccccgtcgtgtagataactacgatacgggagggcttaccatctggccccagtgctgcaatgataccgcgagacccacgctcaccggctccagatttatcagcaataaaccagccagccggaagggccgagcgcagaagtggtcctgcaactttatccgcctccatccagtctattaattgttgccgggaagctagagtaagtagttcgccagttaatagtttgcgcaacgttgttgccattgctacaggcatcgtggtgtcacgctcgtcgtttggtatggcttcattcagctccggttcccaacgatcaaggcgagttacatgatcccccatgttgtgcaaaaaagcggttagctccttcggtcctccgatcgttgtcagaagtaagttggccgcagtgttatcactcatggttatggcagcactgcataattctcttactgtcatgccatccgtaagatgcttttctgtgactggtgagtactcaaccaagtcattctgagaatagtgtatgcggcgaccgagttgctcttgcccggcgtcaatacgggataataccgcgccacatagcagaactttaaaagtgctcatcattggaaaacgttcttcggggcgaaaactctcaaggatcttaccgctgttgagatccagttcgatgtaacccactcgtgcacccaactgatcttcagcatcttttactttcaccagcgtttctgggtgagcaaaaacaggaaggcaaaatgccgcaaaaaagggaataagggcgacacggaaatgttgaatactcatactcttcctttttcaatattattgaagcatttatcagggttattgtctcatgagcggatacatatttgaatgtatttagaaaaataaacaaataggggttccgcgcacatttccccgaaaagtgccacctgacgtctaagaaaccattattatcatgacattaacctataaaaataggcgtatcacgaggccctttcgtctcgcgcgtttcggtgatgacggtgaaaacctctgacacatgcagctcccggagacggtcacagcttgtctgtaagcggatgccgggagcagacaagcccgtcagggcgcgtcagcgggtgttggcgggtgtcggggctggcttaactatgcggcatcagagcagattgtactgagagtgcaccataaaattgtaaacgttaatattttgttaaaattcgcgttaaatttttgttaaatcagctcattttttaaccaataggccgaaatcggcaaaatcccttataaatcaaaagaatagc

SEQ ID NO: 119 - DNA, 5950 bp, Artificial Sequence
  plasmid UBIGMWUS
cccgtagaaaagatcaaaggatcttcttgagatcctttttttctgcgcgtaatctgctgcttgcaaacaaaaaaaccaccgctaccagcggtggtttgtttgccggatcaagagctaccaactctttttccgaaggtaactggcttcagcagagcgcagataccaaatactgtccttctagtgtagccgtagttaggccaccacttcaagaactctgtagcaccgcctacatacctcgctctgctaatcctgttaccagtggctgctgccagtggcgataagtcgtgtcttaccgggttggactcaagacgatagttaccggataaggcgcagcggtcgggctgaacggggggttcgtgcacacagcccagcttggagcgaacgacctacaccgaactgagatacctacagcgtgagcattgagaaagcgccacgcttcccgaagggagaaaggcggacaggtatccggtaagcggcagggtcggaacaggagagcgcacgagggagcttccagggggaaacgcctggtatctttatagtcctgtcgggtttcgccacctctgacttgagcgtcgatttttgtgatgctcgtcaggggggcggagcctatggaaaaacgccagcaacgcggcctttttacggttcctggccttttgctggccttttgctcacatgttctttcctgcgttatcccctgattctgtggataaccgtattaccgcctttgagtgagctgataccgctcgccgcagccgaacgaccgagcgcagcgagtcagtgagcgaggaagcggaagagcgcccaatacgcaaaccgcctctccccgcgcgttggccgattcattaatgcagctggcacgacaggtttcccgactggaaagcgggcagtgagcgcaacgcaattaatacgcgtaccgctagccaggaagagtttgtagaaacgcaaaaaggccatccgtcaggatggccttctgcttagtttgatgcctggcagtttatggcgggcgtcctgcccgccaccctccgggccgttgcttcacaacgttcaaatccgctcccggcggatttgtcctactcaggagagcgttcaccgacaaacaacagataaaacgaaaggcccagtcttccgactgagcctttcgttttatttgatgcctggcagttccctactctcgcgttaacgctagcatggatgttttcccagtcacgacgttgtaaaacgacggccagtcttaagctcgggccccaaataatgattttattttgactgatagtgacctgttcgttgcaacaaattgatgagcaatgcttttttataatgccaagtttgtacaaaaaagcaggctccggccagaatccggtaagtgactagggtcacatcgaattcccataggattggggccagaatggccgcggccgcatcaggatattcttgtttaagatgttgaactctatggaggtttgtatgaactgatgatctaggaccggataagttcccttcttcatagcgaacttattcaaagaatgttttgtgtatcattcttgttacattgttattaatgaaaaaatattattggtcattggactgaacacgagtgttaaatatggaccaggccccaaataagatccattgatatatgaattaaataacaagaataaatcgagtcaccaaaccacttgccttttttaacgagacttgttcaccaacttgatacaaaagtcattatcctatgcaaatcaataatcatacaaaaatatccaataacactaaaaaattaaaagaaatggataatttcacaatatgttatacgataaagaagttacttttccaagaaattcactgattttataagcccacttgcattagataaatggcaaaaaaaaacaaaaaggaaaagaaataaagcacgaagaattctagaaaatacgaaatacgcttcaatgcagtgggacccacggttcaattattgccaattttcagctccaccgtatatttaaaaaataaaacgataatgctaaaaaaatataaatcgtaacgatcgttaaatctcaacggctggatcttatgacgaccgttagaaattgtggttgtcgacgagtcagtaataaacggcgtcaaagtggttgcagccggcacacacgagtcgtgtttatcaactcaaagcacaaatacttttcctcaacctaaaaataaggcaattagccaaaaacaactttgcgtgtaaacaacgctcaatacacgtgtcattttattattagctattgcttcaccgccttagctttctcgtgacctagtcgtcctcgtcttttcttcttcttcttctataaaacaatacccaaagagctcttcttcttcacaattcagatttcaatttctcaaaatcttaaaaactttctctcaattctctctaccgtgatcaaggtaaatttctgtgttccttattctctcaaaatcttcgattttgttttcgttcgatcccaatttcgtatatgttctttggtttagattctgttaatcttagatcgaagacgattttctgggtttgatcgttagatatcatcttaattctcgattagggtttcatagatatcatccgatttgttcaaataatttgagttttgtcgaataattactcttcgatttgtgatttctatctagatctggtgttagtttctagtttgtgcgatcgaatttgtcgattaatctgagtttttctgattaacagccatggaacctcaacaacaacaacaacaagcacaagggagccaacaacaacaacaaaacgaggatggtggcagtggaaaaggggggtttctgagcaggcaaagtagtacacggtggactccaacaaacgaccagataagaatattgaaggaactttactacaacaatggaattagatccccgagtgcagagcagattcagaggatctctgctaggctgaggcagtacggtaagattgaaggcaagaatgtcttttattggttccagaaccacaaagctcgagaaaggcagaagaaaaggttcacttctgatcataatcataataatgtccccatgcaaagacccccaactaatccttctgctgcttggaaacctgatctagctgatcccattcacaccaccaagtattgtaacatctcttctactgcagggatctcttcggcatcatcttctgttgagatggttactgtgggacagatggggaattatgggtatggttctgtgcctatggagaaaagttttagggactgctcgatatcagctgggggtagcagtggccatgttggattaataaaccacaacttggggtgggttggtgtggacccatataattcctcaacctatgccaacttctttgacaaaataaggccaagtgatcaagaaacccttgaagaagaagcagagaacattggtgctactaagattgaaaccctccctttattccctatgcacggtgaggacatccacggctattgcaacctcaagtctaattcgtataactatgatggaaacggctggtatcatactgaagaagggttcaagaatgcttctcgtgcttccttggagctcagtctcaactcctacactcgcaggtctccagattatgcttaaagatccgtttttgtgatctgatgataagtggttggttcgtgtctcatgcacttgggaggtgatctatttcacctggtgtagtttgtgtttccgtcagttggaaaaacttatccctatcgatttcgttttcattttctgcttttcttttatgtaccttcgtttgggcttgtaacgggcctttgtatttcaactctcaataataatccaagtgcatgttaaacaatttgtcatctgtttcggctttgatatactactggtgaagatgggccgtactactgcatcacaacgaaaaataataataagatgaaaaacttgaagtggaaaaaaaaaaaaacttgaatgttcactactactcattgaccataatgtttaacatacatagctcaatagtatttttgtgaatatggcaacacaaacagtccaaaacaattgtctcttactataccaaaccaagggcgccgcttgtttgccactctttgtgtgcaatagtgtgattaccacatctccacattcaatatattccctgaattatctgacgattttgatggctcactgttttcccaagtcttgaattgtcttctgtgcgccagtcaaatgcatatgtgttgagtttatcttttaaatatcaagcttttgtttttaacttttgtttgtaaccaaaaactcacagtaggagtttgatcacataattttatgtttgcctttgcaatttctagtgagtctttgattaaaagcttgaaaagaaaatgcagccaagcttaccaagtaagttatgtgtattaaccagaggaagagagaatcttgcaaaatttcaacaaacacaaaaagaagtattactacgattggtggagaaagaaaacgattccaaatcttgaactgttgttgtaaaagcatagcagaaagtgggagacaaccgaaatagaaatgactataacttaatttaatgttatcattataatttcttctagcaaatatttagaaagtaaatatcacatcaacctttaatgtaattaagctttctctttttgattcatgtgagatgaaaagaaaaaaaagaagagaaaagtgtagaaaacacatcatttctaagctgaaggcggccgcggtcaccccatacgattggaagcttcccgggcacccagctttcttgtacaaagtgggcattataagaaagcattgcttatcaatttgttgcaacgaacaggtcactatcagtcaaaataaaatcattatttgccatccagctgatatcccctatagtgagtcgtattacatggtcatagctgtttcctggcagctctggcccgtgtctcaaaatctctgatgttacattgcacaagataaaaatatatcatcatgaacaataaaactgtctgcttacataaacagtaatacaaggggtgttatgagccatattcaacgggaaacgtcgaggccgcgattaaattccaacatggatgctgatttatatgggtataaatgggctcgcgataatgtcgggcaatcaggtgcgacaatctatcgcttgtatgggaagcccgatgcgccagagttgtttctgaaacatggcaaaggtagcgttgccaatgatgttacagatgagatggtcagactaaactggctgacggaatttatgcctcttccgaccatcaagcattttatccgtactcctgatgatgcatggttactcaccactgcgatccccggaaaaacagcattccaggtattagaagaatatcctgattcaggtgaaaatattgttgatgcgctggcagtgttcctgcgccggttgcattcgattcctgtttgtaattgtccttttaacagcgatcgcgtatttcgtctcgctcaggcgcaatcacgaatgaataacggtttggttgatgcgagtgattttgatgacgagcgtaatggctggcctgttgaacaagtctggaaagaaatgcataaacttttgccattctcaccggattcagtcgtcactcatggtgatttctcacttgataaccttatttttgacgaggggaaattaataggttgtattgatgttggacgagtcggaatcgcagaccgataccaggatcttgccatcctatggaactgcctcggtgagttttctccttcattacagaaacggctttttcaaaaatatggtattgataatcctgatatgaataaattgcagtttcatttgatgctcgatgagtttttctaatcagaattggttaattggttgtaacactggcagagcattacgctgacttgacgggacggcgcaagctcatgaccaaaatcccttaacgtgagttacgcgtcgttccactgagcgtcagac

SEQ ID NO: 120 - DNA, 5971 bp, Artificial Sequence
  plasmid UBIMTWUS
cccgtagaaaagatcaaaggatcttcttgagatcctttttttctgcgcgtaatctgctgcttgcaaacaaaaaaaccaccgctaccagcggtggtttgtttgccggatcaagagctaccaactctttttccgaaggtaactggcttcagcagagcgcagataccaaatactgtccttctagtgtagccgtagttaggccaccacttcaagaactctgtagcaccgcctacatacctcgctctgctaatcctgttaccagtggctgctgccagtggcgataagtcgtgtcttaccgggttggactcaagacgatagttaccggataaggcgcagcggtcgggctgaacggggggttcgtgcacacagcccagcttggagcgaacgacctacaccgaactgagatacctacagcgtgagcattgagaaagcgccacgcttcccgaagggagaaaggcggacaggtatccggtaagcggcagggtcggaacaggagagcgcacgagggagcttccagggggaaacgcctggtatctttatagtcctgtcgggtttcgccacctctgacttgagcgtcgatttttgtgatgctcgtcaggggggcggagcctatggaaaaacgccagcaacgcggcctttttacggttcctggccttttgctggccttttgctcacatgttctttcctgcgttatcccctgattctgtggataaccgtattaccgcctttgagtgagctgataccgctcgccgcagccgaacgaccgagcgcagcgagtcagtgagcgaggaagcggaagagcgcccaatacgcaaaccgcctctccccgcgcgttggccgattcattaatgcagctggcacgacaggtttcccgactggaaagcgggcagtgagcgcaacgcaattaatacgcgtaccgctagccaggaagagtttgtagaaacgcaaaaaggccatccgtcaggatggccttctgcttagtttgatgcctggcagtttatggcgggcgtcctgcccgccaccctccgggccgttgcttcacaacgttcaaatccgctcccggcggatttgtcctactcaggagagcgttcaccgacaaacaacagataaaacgaaaggcccagtcttccgactgagcctttcgttttatttgatgcctggcagttccctactctcgcgttaacgctagcatggatgttttcccagtcacgacgttgtaaaacgacggccagtcttaagctcgggccccaaataatgattttattttgactgatagtgacctgttcgttgcaacaaattgatgagcaatgcttttttataatgccaagtttgtacaaaaaagcaggctccggccagaatccggtaagtgactagggtcacatcgaattcccataggattggggccagaatggccgcggccgcatcaggatattcttgtttaagatgttgaactctatggaggtttgtatgaactgatgatctaggaccggataagttcccttcttcatagcgaacttattcaaagaatgttttgtgtatcattcttgttacattgttattaatgaaaaaatattattggtcattggactgaacacgagtgttaaatatggaccaggccccaaataagatccattgatatatgaattaaataacaagaataaatcgagtcaccaaaccacttgccttttttaacgagacttgttcaccaacttgatacaaaagtcattatcctatgcaaatcaataatcatacaaaaatatccaataacactaaaaaattaaaagaaatggataatttcacaatatgttatacgataaagaagttacttttccaagaaattcactgattttataagcccacttgcattagataaatggcaaaaaaaaacaaaaaggaaaagaaataaagcacgaagaattctagaaaatacgaaatacgcttcaatgcagtgggacccacggttcaattattgccaattttcagctccaccgtatatttaaaaaataaaacgataatgctaaaaaaatataaatcgtaacgatcgttaaatctcaacggctggatcttatgacgaccgttagaaattgtggttgtcgacgagtcagtaataaacggcgtcaaagtggttgcagccggcacacacgagtcgtgtttatcaactcaaagcacaaatacttttcctcaacctaaaaataaggcaattagccaaaaacaactttgcgtgtaaacaacgctcaatacacgtgtcattttattattagctattgcttcaccgccttagctttctcgtgacctagtcgtcctcgtcttttcttcttcttcttctataaaacaatacccaaagagctcttcttcttcacaattcagatttcaatttctcaaaatcttaaaaactttctctcaattctctctaccgtgatcaaggtaaatttctgtgttccttattctctcaaaatcttcgattttgttttcgttcgatcccaatttcgtatatgttctttggtttagattctgttaatcttagatcgaagacgattttctgggtttgatcgttagatatcatcttaattctcgattagggtttcatagatatcatccgatttgttcaaataatttgagttttgtcgaataattactcttcgatttgtgatttctatctagatctggtgttagtttctagtttgtgcgatcgaatttgtcgattaatctgagtttttctgattaacagccatggaacaacctcagcagcagcagcaaccacagacccaacagcactctccaaacaacggaatcatggggtccagacagagttccaccagatggaccccaacaaccgaccagatccgcattctcaaagacctctactacaacaacggaataaggtctccaagtgccgagcaaatccagaggatctccgcaaggctcagacagtacgggaagatcgagggcaagaacgtcttctactggttccaaaaccacaaagccagagagcgccagaaaaagcgcttcacctccgacgtcaacgtcgtccctatcatccagcgcgcccccaacaacaatactatcataagtgccgccaactggaagcctgaccaccacgaacaacagcagaacattaatgtccacacaaaccactccacatacaacatctcctccgctggcctcagttctgcttcctgctcctcagcagaaatggtcactgtggggcaaataggcaactacggctacgggtctgtcccaatggagaagtctttccgcgaatgcaccatctcagctggatgctcatcatcccaggttggctcaaccataaacccccacatcggctggatcggacaccacgtcgacccatattcaagtgcctacgctaacctcttcgagaaaatacgccccaacgaggagatcatggaagagtacgaccagggacaggaaaacggttccccagagatcgagacactcccactcttccctatgcacggagaagacatccacggagggtattgcaacctcaaatcaaattcctccaactacggaggatggtaccaggcagaagacgcagggttcatgtacggaagtcgtaccacttctctcgagctcagtctgaactcctacggatgcaggtcccccgactacgccaattaaggatccgtttttgtgatctgatgataagtggttggttcgtgtctcatgcacttgggaggtgatctatttcacctggtgtagtttgtgtttccgtcagttggaaaaacttatccctatcgatttcgttttcattttctgcttttcttttatgtaccttcgtttgggcttgtaacgggcctttgtatttcaactctcaataataatccaagtgcatgttaaacaatttgtcatctgtttcggctttgatatactactggtgaagatgggccgtactactgcatcacaacgaaaaataataataagatgaaaaacttgaagtggaaaaaaaaaaaaacttgaatgttcactactactcattgaccataatgtttaacatacatagctcaatagtatttttgtgaatatggcaacacaaacagtccaaaacaattgtctcttactataccaaaccaagggcgccgcttgtttgccactctttgtgtgcaatagtgtgattaccacatctccacattcaatatattccctgaattatctgacgattttgatggctcactgttttcccaagtcttgaattgtcttctgtgcgccagtcaaatgcatatgtgttgagtttatcttttaaatatcaagcttttgtttttaacttttgtttgtaaccaaaaactcacagtaggagtttgatcacataattttatgtttgcctttgcaatttctagtgagtctttgattaaaagcttgaaaagaaaatgcagccaagcttaccaagtaagttatgtgtattaaccagaggaagagagaatcttgcaaaatttcaacaaacacaaaaagaagtattactacgattggtggagaaagaaaacgattccaaatcttgaactgttgttgtaaaagcatagcagaaagtgggagacaaccgaaatagaaatgactataacttaatttaatgttatcattataatttcttctagcaaatatttagaaagtaaatatcacatcaacctttaatgtaattaagctttctctttttgattcatgtgagatgaaaagaaaaaaaagaagagaaaagtgtagaaaacacatcatttctaagctgaaggcggccgcggtcaccccatacgattggaagcttcccgggcacccagctttcttgtacaaagtgggcattataagaaagcattgcttatcaatttgttgcaacgaacaggtcactatcagtcaaaataaaatcattatttgccatccagctgatatcccctatagtgagtcgtattacatggtcatagctgtttcctggcagctctggcccgtgtctcaaaatctctgatgttacattgcacaagataaaaatatatcatcatgaacaataaaactgtctgcttacataaacagtaatacaaggggtgttatgagccatattcaacgggaaacgtcgaggccgcgattaaattccaacatggatgctgatttatatgggtataaatgggctcgcgataatgtcgggcaatcaggtgcgacaatctatcgcttgtatgggaagcccgatgcgccagagttgtttctgaaacatggcaaaggtagcgttgccaatgatgttacagatgagatggtcagactaaactggctgacggaatttatgcctcttccgaccatcaagcattttatccgtactcctgatgatgcatggttactcaccactgcgatccccggaaaaacagcattccaggtattagaagaatatcctgattcaggtgaaaatattgttgatgcgctggcagtgttcctgcgccggttgcattcgattcctgtttgtaattgtccttttaacagcgatcgcgtatttcgtctcgctcaggcgcaatcacgaatgaataacggtttggttgatgcgagtgattttgatgacgagcgtaatggctggcctgttgaacaagtctggaaagaaatgcataaacttttgccattctcaccggattcagtcgtcactcatggtgatttctcacttgataaccttatttttgacgaggggaaattaataggttgtattgatgttggacgagtcggaatcgcagaccgataccaggatcttgccatcctatggaactgcctcggtgagttttctccttcattacagaaacggctttttcaaaaatatggtattgataatcctgatatgaataaattgcagtttcatttgatgctcgatgagtttttctaatcagaattggttaattggttgtaacactggcagagcattacgctgacttgacgggacggcgcaagctcatgaccaaaatcccttaacgtgagttacgcgtcgttccactgagcgtcagac

SEQ ID NO: 121 - DNA, 5941 bp, Artificial Sequence
  plasmid UBILJWUS
cccgtagaaaagatcaaaggatcttcttgagatcctttttttctgcgcgtaatctgctgcttgcaaacaaaaaaaccaccgctaccagcggtggtttgtttgccggatcaagagctaccaactctttttccgaaggtaactggcttcagcagagcgcagataccaaatactgtccttctagtgtagccgtagttaggccaccacttcaagaactctgtagcaccgcctacatacctcgctctgctaatcctgttaccagtggctgctgccagtggcgataagtcgtgtcttaccgggttggactcaagacgatagttaccggataaggcgcagcggtcgggctgaacggggggttcgtgcacacagcccagcttggagcgaacgacctacaccgaactgagatacctacagcgtgagcattgagaaagcgccacgcttcccgaagggagaaaggcggacaggtatccggtaagcggcagggtcggaacaggagagcgcacgagggagcttccagggggaaacgcctggtatctttatagtcctgtcgggtttcgccacctctgacttgagcgtcgatttttgtgatgctcgtcaggggggcggagcctatggaaaaacgccagcaacgcggcctttttacggttcctggccttttgctggccttttgctcacatgttctttcctgcgttatcccctgattctgtggataaccgtattaccgcctttgagtgagctgataccgctcgccgcagccgaacgaccgagcgcagcgagtcagtgagcgaggaagcggaagagcgcccaatacgcaaaccgcctctccccgcgcgttggccgattcattaatgcagctggcacgacaggtttcccgactggaaagcgggcagtgagcgcaacgcaattaatacgcgtaccgctagccaggaagagtttgtagaaacgcaaaaaggccatccgtcaggatggccttctgcttagtttgatgcctggcagtttatggcgggcgtcctgcccgccaccctccgggccgttgcttcacaacgttcaaatccgctcccggcggatttgtcctactcaggagagcgttcaccgacaaacaacagataaaacgaaaggcccagtcttccgactgagcctttcgttttatttgatgcctggcagttccctactctcgcgttaacgctagcatggatgttttcccagtcacgacgttgtaaaacgacggccagtcttaagctcgggccccaaataatgattttattttgactgatagtgacctgttcgttgcaacaaattgatgagcaatgcttttttataatgccaagtttgtacaaaaaagcaggctccggccagaatccggtaagtgactagggtcacatcgaattcccataggattggggccagaatggccgcggccgcatcaggatattcttgtttaagatgttgaactctatggaggtttgtatgaactgatgatctaggaccggataagttcccttcttcatagcgaacttattcaaagaatgttttgtgtatcattcttgttacattgttattaatgaaaaaatattattggtcattggactgaacacgagtgttaaatatggaccaggccccaaataagatccattgatatatgaattaaataacaagaataaatcgagtcaccaaaccacttgccttttttaacgagacttgttcaccaacttgatacaaaagtcattatcctatgcaaatcaataatcatacaaaaatatccaataacactaaaaaattaaaagaaatggataatttcacaatatgttatacgataaagaagttacttttccaagaaattcactgattttataagcccacttgcattagataaatggcaaaaaaaaacaaaaaggaaaagaaataaagcacgaagaattctagaaaatacgaaatacgcttcaatgcagtgggacccacggttcaattattgccaattttcagctccaccgtatatttaaaaaataaaacgataatgctaaaaaaatataaatcgtaacgatcgttaaatctcaacggctggatcttatgacgaccgttagaaattgtggttgtcgacgagtcagtaataaacggcgtcaaagtggttgcagccggcacacacgagtcgtgtttatcaactcaaagcacaaatacttttcctcaacctaaaaataaggcaattagccaaaaacaactttgcgtgtaaacaacgctcaatacacgtgtcattttattattagctattgcttcaccgccttagctttctcgtgacctagtcgtcctcgtcttttcttcttcttcttctataaaacaatacccaaagagctcttcttcttcacaattcagatttcaatttctcaaaatcttaaaaactttctctcaattctctctaccgtgatcaaggtaaatttctgtgttccttattctctcaaaatcttcgattttgttttcgttcgatcccaatttcgtatatgttctttggtttagattctgttaatcttagatcgaagacgattttctgggtttgatcgttagatatcatcttaattctcgattagggtttcatagatatcatccgatttgttcaaataatttgagttttgtcgaataattactcttcgatttgtgatttctatctagatctggtgttagtttctagtttgtgcgatcgaatttgtcgattaatctgagtttttctgattaacagccatggaacaacctccccaacagcagcaacaaaacgaagacggaggcggatcaagtgggggaaaaggagggttcctcagtaggcagtccagtactaggtggacacccaccacagaccagattcgcatcctcaaggagctctactacaacaacggaatacgctcaccctccgcagaacagatccagaggatctccgcaagactcagacagtacggcaagatcgagggcaagaacgtcttctactggttccaaaaccacaaagcccgcgaaaggcagaagaagcgcttcaccagtgagacacacttgctgcccaacccaattcagcagcaacagcgcaacggaacaaacgcagcttggaagcagccagaggagcaacccatcatcaaccacaccaagtactcctccaacaacatatccgcacccgcagggattatcacaagtgccccatcttcttccgcagaaatagtctccgtggggcagatcggaaacttcggatacggatctctgccaatggagaagtccttcagggactgcagtatctcagccggaggtaacacaggatacgccgggtctgctattaaccacaacctcggatggatgggagtcgacccatactcctctgcttacaccaacttcttcgacaaaatacgcccaacagaggaggagactatggaggaagaaggacaggagaacggctcaccagaaatcgagaccctgcctttgttcccaatgcacggagaggacatccactccggctacttcaacctcaagagtaactcatcccactacgctggcggatggtaccaaactgaggaaggctacttcaacaacggatcacgcgccagtctggagctgtccctgaagtaccctgacttcgcttagggatccgtttttgtgatctgatgataagtggttggttcgtgtctcatgcacttgggaggtgatctatttcacctggtgtagtttgtgtttccgtcagttggaaaaacttatccctatcgatttcgttttcattttctgcttttcttttatgtaccttcgtttgggcttgtaacgggcctttgtatttcaactctcaataataatccaagtgcatgttaaacaatttgtcatctgtttcggctttgatatactactggtgaagatgggccgtactactgcatcacaacgaaaaataataataagatgaaaaacttgaagtggaaaaaaaaaaaaacttgaatgttcactactactcattgaccataatgtttaacatacatagctcaatagtatttttgtgaatatggcaacacaaacagtccaaaacaattgtctcttactataccaaaccaagggcgccgcttgtttgccactctttgtgtgcaatagtgtgattaccacatctccacattcaatatattccctgaattatctgacgattttgatggctcactgttttcccaagtcttgaattgtcttctgtgcgccagtcaaatgcatatgtgttgagtttatcttttaaatatcaagcttttgtttttaacttttgtttgtaaccaaaaactcacagtaggagtttgatcacataattttatgtttgcctttgcaatttctagtgagtctttgattaaaagcttgaaaagaaaatgcagccaagcttaccaagtaagttatgtgtattaaccagaggaagagagaatcttgcaaaatttcaacaaacacaaaaagaagtattactacgattggtggagaaagaaaacgattccaaatcttgaactgttgttgtaaaagcatagcagaaagtgggagacaaccgaaatagaaatgactataacttaatttaatgttatcattataatttcttctagcaaatatttagaaagtaaatatcacatcaacctttaatgtaattaagctttctctttttgattcatgtgagatgaaaagaaaaaaaagaagagaaaagtgtagaaaacacatcatttctaagctgaaggcggccgcggtcaccccatacgattggaagcttcccgggcacccagctttcttgtacaaagtgggcattataagaaagcattgcttatcaatttgttgcaacgaacaggtcactatcagtcaaaataaaatcattatttgccatccagctgatatcccctatagtgagtcgtattacatggtcatagctgtttcctggcagctctggcccgtgtctcaaaatctctgatgttacattgcacaagataaaaatatatcatcatgaacaataaaactgtctgcttacataaacagtaatacaaggggtgttatgagccatattcaacgggaaacgtcgaggccgcgattaaattccaacatggatgctgatttatatgggtataaatgggctcgcgataatgtcgggcaatcaggtgcgacaatctatcgcttgtatgggaagcccgatgcgccagagttgtttctgaaacatggcaaaggtagcgttgccaatgatgttacagatgagatggtcagactaaactggctgacggaatttatgcctcttccgaccatcaagcattttatccgtactcctgatgatgcatggttactcaccactgcgatccccggaaaaacagcattccaggtattagaagaatatcctgattcaggtgaaaatattgttgatgcgctggcagtgttcctgcgccggttgcattcgattcctgtttgtaattgtccttttaacagcgatcgcgtatttcgtctcgctcaggcgcaatcacgaatgaataacggtttggttgatgcgagtgattttgatgacgagcgtaatggctggcctgttgaacaagtctggaaagaaatgcataaacttttgccattctcaccggattcagtcgtcactcatggtgatttctcacttgataaccttatttttgacgaggggaaattaataggttgtattgatgttggacgagtcggaatcgcagaccgataccaggatcttgccatcctatggaactgcctcggtgagttttctccttcattacagaaacggctttttcaaaaatatggtattgataatcctgatatgaataaattgcagtttcatttgatgctcgatgagtttttctaatcagaattggttaattggttgtaacactggcagagcattacgctgacttgacgggacggcgcaagctcatgaccaaaatcccttaacgtgagttacgcgtcgttccactgagcgtcagac

SEQ ID NO: 122 - DNA, 5932 bp, Artificial Sequence
  plasmid UBIPVWUS
cccgtagaaaagatcaaaggatcttcttgagatcctttttttctgcgcgtaatctgctgcttgcaaacaaaaaaaccaccgctaccagcggtggtttgtttgccggatcaagagctaccaactctttttccgaaggtaactggcttcagcagagcgcagataccaaatactgtccttctagtgtagccgtagttaggccaccacttcaagaactctgtagcaccgcctacatacctcgctctgctaatcctgttaccagtggctgctgccagtggcgataagtcgtgtcttaccgggttggactcaagacgatagttaccggataaggcgcagcggtcgggctgaacggggggttcgtgcacacagcccagcttggagcgaacgacctacaccgaactgagatacctacagcgtgagcattgagaaagcgccacgcttcccgaagggagaaaggcggacaggtatccggtaagcggcagggtcggaacaggagagcgcacgagggagcttccagggggaaacgcctggtatctttatagtcctgtcgggtttcgccacctctgacttgagcgtcgatttttgtgatgctcgtcaggggggcggagcctatggaaaaacgccagcaacgcggcctttttacggttcctggccttttgctggccttttgctcacatgttctttcctgcgttatcccctgattctgtggataaccgtattaccgcctttgagtgagctgataccgctcgccgcagccgaacgaccgagcgcagcgagtcagtgagcgaggaagcggaagagcgcccaatacgcaaaccgcctctccccgcgcgttggccgattcattaatgcagctggcacgacaggtttcccgactggaaagcgggcagtgagcgcaacgcaattaatacgcgtaccgctagccaggaagagtttgtagaaacgcaaaaaggccatccgtcaggatggccttctgcttagtttgatgcctggcagtttatggcgggcgtcctgcccgccaccctccgggccgttgcttcacaacgttcaaatccgctcccggcggatttgtcctactcaggagagcgttcaccgacaaacaacagataaaacgaaaggcccagtcttccgactgagcctttcgttttatttgatgcctggcagttccctactctcgcgttaacgctagcatggatgttttcccagtcacgacgttgtaaaacgacggccagtcttaagctcgggccccaaataatgattttattttgactgatagtgacctgttcgttgcaacaaattgatgagcaatgcttttttataatgccaagtttgtacaaaaaagcaggctccggccagaatccggtaagtgactagggtcacatcgaattcccataggattggggccagaatggccgcggccgcatcaggatattcttgtttaagatgttgaactctatggaggtttgtatgaactgatgatctaggaccggataagttcccttcttcatagcgaacttattcaaagaatgttttgtgtatcattcttgttacattgttattaatgaaaaaatattattggtcattggactgaacacgagtgttaaatatggaccaggccccaaataagatccattgatatatgaattaaataacaagaataaatcgagtcaccaaaccacttgccttttttaacgagacttgttcaccaacttgatacaaaagtcattatcctatgcaaatcaataatcatacaaaaatatccaataacactaaaaaattaaaagaaatggataatttcacaatatgttatacgataaagaagttacttttccaagaaattcactgattttataagcccacttgcattagataaatggcaaaaaaaaacaaaaaggaaaagaaataaagcacgaagaattctagaaaatacgaaatacgcttcaatgcagtgggacccacggttcaattattgccaattttcagctccaccgtatatttaaaaaataaaacgataatgctaaaaaaatataaatcgtaacgatcgttaaatctcaacggctggatcttatgacgaccgttagaaattgtggttgtcgacgagtcagtaataaacggcgtcaaagtggttgcagccggcacacacgagtcgtgtttatcaactcaaagcacaaatacttttcctcaacctaaaaataaggcaattagccaaaaacaactttgcgtgtaaacaacgctcaatacacgtgtcattttattattagctattgcttcaccgccttagctttctcgtgacctagtcgtcctcgtcttttcttcttcttcttctataaaacaatacccaaagagctcttcttcttcacaattcagatttcaatttctcaaaatcttaaaaactttctctcaattctctctaccgtgatcaaggtaaatttctgtgttccttattctctcaaaatcttcgattttgttttcgttcgatcccaatttcgtatatgttctttggtttagattctgttaatcttagatcgaagacgattttctgggtttgatcgttagatatcatcttaattctcgattagggtttcatagatatcatccgatttgttcaaataatttgagttttgtcgaataattactcttcgatttgtgatttctatctagatctggtgttagtttctagtttgtgcgatcgaatttgtcgattaatctgagtttttctgattaacagccatggaaccacagcagccccagggcagtcaaccaaacgaggacggtggaagtgggaaaggcggatttctctccagacagtcctccactaggtggactccaaccactgaccagatcagaatactcaaagacctctactacaacaacggaatcagatccccttccgcagaacagatccaaaggatctccgctaggctcagacagtacgggaagatcgagggcaagaacgtcttctactggttccaaaaccacaaggccagggagagacagaagaagaggttcacctccgacaacgtccccatgcaaagacctgcaccaacaaatgctgcacctccttggaaacccgaccaagaccccattcacaccaagtactccaacatctcctccacaggaatctccagtgcatcctcctcctcagtcgagatgatcaccgtcggacaaatggggaactacgggtacggaagtgtgccaatggaaaagtccttcagagactgctccatatccgccggaggatcttccggtcatgttggaataaaccacaacctcggctgggtgggagtcgatccttactcttctgcatacgccaacttcttcgataaaataagaccaaacgaagagaccctcgaggaagaagaagaggaggaggaggaggaagaagaagaggacggaggagcagaaattgagaccctccccctgttcccaatgcacggagaggacattcacggctactgcaacctcaagtccaacagttacaactacgacggcaacggctggtatcacagtgaggatggcttcaaaaacggcagtagggcctccctcgagctctccctcaactcttacaccagaagatcccccgacttcgcatagatgcatagatccgtttttgtgatctgatgataagtggttggttcgtgtctcatgcacttgggaggtgatctatttcacctggtgtagtttgtgtttccgtcagttggaaaaacttatccctatcgatttcgttttcattttctgcttttcttttatgtaccttcgtttgggcttgtaacgggcctttgtatttcaactctcaataataatccaagtgcatgttaaacaatttgtcatctgtttcggctttgatatactactggtgaagatgggccgtactactgcatcacaacgaaaaataataataagatgaaaaacttgaagtggaaaaaaaaaaaaacttgaatgttcactactactcattgaccataatgtttaacatacatagctcaatagtatttttgtgaatatggcaacacaaacagtccaaaacaattgtctcttactataccaaaccaagggcgccgcttgtttgccactctttgtgtgcaatagtgtgattaccacatctccacattcaatatattccctgaattatctgacgattttgatggctcactgttttcccaagtcttgaattgtcttctgtgcgccagtcaaatgcatatgtgttgagtttatcttttaaatatcaagcttttgtttttaacttttgtttgtaaccaaaaactcacagtaggagtttgatcacataattttatgtttgcctttgcaatttctagtgagtctttgattaaaagcttgaaaagaaaatgcagccaagcttaccaagtaagttatgtgtattaaccagaggaagagagaatcttgcaaaatttcaacaaacacaaaaagaagtattactacgattggtggagaaagaaaacgattccaaatcttgaactgttgttgtaaaagcatagcagaaagtgggagacaaccgaaatagaaatgactataacttaatttaatgttatcattataatttcttctagcaaatatttagaaagtaaatatcacatcaacctttaatgtaattaagctttctctttttgattcatgtgagatgaaaagaaaaaaaagaagagaaaagtgtagaaaacacatcatttctaagctgaaggcggccgcggtcaccccatacgattggaagcttcccgggcacccagctttcttgtacaaagtgggcattataagaaagcattgcttatcaatttgttgcaacgaacaggtcactatcagtcaaaataaaatcattatttgccatccagctgatatcccctatagtgagtcgtattacatggtcatagctgtttcctggcagctctggcccgtgtctcaaaatctctgatgttacattgcacaagataaaaatatatcatcatgaacaataaaactgtctgcttacataaacagtaatacaaggggtgttatgagccatattcaacgggaaacgtcgaggccgcgattaaattccaacatggatgctgatttatatgggtataaatgggctcgcgataatgtcgggcaatcaggtgcgacaatctatcgcttgtatgggaagcccgatgcgccagagttgtttctgaaacatggcaaaggtagcgttgccaatgatgttacagatgagatggtcagactaaactggctgacggaatttatgcctcttccgaccatcaagcattttatccgtactcctgatgatgcatggttactcaccactgcgatccccggaaaaacagcattccaggtattagaagaatatcctgattcaggtgaaaatattgttgatgcgctggcagtgttcctgcgccggttgcattcgattcctgtttgtaattgtccttttaacagcgatcgcgtatttcgtctcgctcaggcgcaatcacgaatgaataacggtttggttgatgcgagtgattttgatgacgagcgtaatggctggcctgttgaacaagtctggaaagaaatgcataaacttttgccattctcaccggattcagtcgtcactcatggtgatttctcacttgataaccttatttttgacgaggggaaattaataggttgtattgatgttggacgagtcggaatcgcagaccgataccaggatcttgccatcctatggaactgcctcggtgagttttctccttcattacagaaacggctttttcaaaaatatggtattgataatcctgatatgaataaattgcagtttcatttgatgctcgatgagtttttctaatcagaattggttaattggttgtaacactggcagagcattacgctgacttgacgggacggcgcaagctcatgaccaaaatcccttaacgtgagttacgcgtcgttccactgagcgtcagac

SEQ ID NO: 123 - DNA, 5992 bp, Artificial Sequence
  plasmid UBIPYWUS
cccgtagaaaagatcaaaggatcttcttgagatcctttttttctgcgcgtaatctgctgcttgcaaacaaaaaaaccaccgctaccagcggtggtttgtttgccggatcaagagctaccaactctttttccgaaggtaactggcttcagcagagcgcagataccaaatactgtccttctagtgtagccgtagttaggccaccacttcaagaactctgtagcaccgcctacatacctcgctctgctaatcctgttaccagtggctgctgccagtggcgataagtcgtgtcttaccgggttggactcaagacgatagttaccggataaggcgcagcggtcgggctgaacggggggttcgtgcacacagcccagcttggagcgaacgacctacaccgaactgagatacctacagcgtgagcattgagaaagcgccacgcttcccgaagggagaaaggcggacaggtatccggtaagcggcagggtcggaacaggagagcgcacgagggagcttccagggggaaacgcctggtatctttatagtcctgtcgggtttcgccacctctgacttgagcgtcgatttttgtgatgctcgtcaggggggcggagcctatggaaaaacgccagcaacgcggcctttttacggttcctggccttttgctggccttttgctcacatgttctttcctgcgttatcccctgattctgtggataaccgtattaccgcctttgagtgagctgataccgctcgccgcagccgaacgaccgagcgcagcgagtcagtgagcgaggaagcggaagagcgcccaatacgcaaaccgcctctccccgcgcgttggccgattcattaatgcagctggcacgacaggtttcccgactggaaagcgggcagtgagcgcaacgcaattaatacgcgtaccgctagccaggaagagtttgtagaaacgcaaaaaggccatccgtcaggatggccttctgcttagtttgatgcctggcagtttatggcgggcgtcctgcccgccaccctccgggccgttgcttcacaacgttcaaatccgctcccggcggatttgtcctactcaggagagcgttcaccgacaaacaacagataaaacgaaaggcccagtcttccgactgagcctttcgttttatttgatgcctggcagttccctactctcgcgttaacgctagcatggatgttttcccagtcacgacgttgtaaaacgacggccagtcttaagctcgggccccaaataatgattttattttgactgatagtgacctgttcgttgcaacaaattgatgagcaatgcttttttataatgccaagtttgtacaaaaaagcaggctccggccagaatccggtaagtgactagggtcacatcgaattcccataggattggggccagaatggccgcggccgcatcaggatattcttgtttaagatgttgaactctatggaggtttgtatgaactgatgatctaggaccggataagttcccttcttcatagcgaacttattcaaagaatgttttgtgtatcattcttgttacattgttattaatgaaaaaatattattggtcattggactgaacacgagtgttaaatatggaccaggccccaaataagatccattgatatatgaattaaataacaagaataaatcgagtcaccaaaccacttgccttttttaacgagacttgttcaccaacttgatacaaaagtcattatcctatgcaaatcaataatcatacaaaaatatccaataacactaaaaaattaaaagaaatggataatttcacaatatgttatacgataaagaagttacttttccaagaaattcactgattttataagcccacttgcattagataaatggcaaaaaaaaacaaaaaggaaaagaaataaagcacgaagaattctagaaaatacgaaatacgcttcaatgcagtgggacccacggttcaattattgccaattttcagctccaccgtatatttaaaaaataaaacgataatgctaaaaaaatataaatcgtaacgatcgttaaatctcaacggctggatcttatgacgaccgttagaaattgtggttgtcgacgagtcagtaataaacggcgtcaaagtggttgcagccggcacacacgagtcgtgtttatcaactcaaagcacaaatacttttcctcaacctaaaaataaggcaattagccaaaaacaactttgcgtgtaaacaacgctcaatacacgtgtcattttattattagctattgcttcaccgccttagctttctcgtgacctagtcgtcctcgtcttttcttcttcttcttctataaaacaatacccaaagagctcttcttcttcacaattcagatttcaatttctcaaaatcttaaaaactttctctcaattctctctaccgtgatcaaggtaaatttctgtgttccttattctctcaaaatcttcgattttgttttcgttcgatcccaatttcgtatatgttctttggtttagattctgttaatcttagatcgaagacgattttctgggtttgatcgttagatatcatcttaattctcgattagggtttcatagatatcatccgatttgttcaaataatttgagttttgtcgaataattactcttcgatttgtgatttctatctagatctggtgttagtttctagtttgtgcgatcgaatttgtcgattaatctgagtttttctgattaacagccatggaaacagcacagcaccagcagaacaaccaacagcactacctccaccaacacctctccatcggacaaggaacaaacatcgaggacggcagtaacaagaacaactcctccaacttcatgtgcaggcaaaatagtacccgctggacaccaaccactgaccagatcaggatattaaaggacctctactacaacaacggagtcagatcacctaccgctgaacagatccagagaatctccgccaagctcaggcagtacggcaagatcgagggcaagaacgtcttctactggttccagaaccataaagcccgcgagagacaaaagaagcgcctcatcgccgcagccaccaccgataacactaacctcccaatgcagatgcagttccagagaggagtctggagatcctctgcagacgaccccatccaccacaagtatactaatccaggagtgcactgcccttcagcttcttcccacggagttctcgcagtcggacagaacggcaatcacggatacggagccttggcaatggaaaaatccttccgcgactgctccatcagtccaggcagttccatgtcacaccaccaccaccaaaacttcgcttgggcaggagtcgatccttattcctcaaccacaacctaccctttcctcgagaagaccaagcacttcgagaatgaaaccctcgaagctgatgaagagcagcaagaggaggaccaggagaactactactaccaaaggaccacctctgccatcgaaaccctgcctctcttccctatgcacgaggagaacatctcctccttctgcaacctcaagcaccaggagtcatccggaggattctacaccgagtggtacagagcagacgacaacctcgcagcagccagagcttccctcgagctctccttgaactccttcatcggcaactcctcctagcagctgagatccgtttttgtgatctgatgataagtggttggttcgtgtctcatgcacttgggaggtgatctatttcacctggtgtagtttgtgtttccgtcagttggaaaaacttatccctatcgatttcgttttcattttctgcttttcttttatgtaccttcgtttgggcttgtaacgggcctttgtatttcaactctcaataataatccaagtgcatgttaaacaatttgtcatctgtttcggctttgatatactactggtgaagatgggccgtactactgcatcacaacgaaaaataataataagatgaaaaacttgaagtggaaaaaaaaaaaaacttgaatgttcactactactcattgaccataatgtttaacatacatagctcaatagtatttttgtgaatatggcaacacaaacagtccaaaacaattgtctcttactataccaaaccaagggcgccgcttgtttgccactctttgtgtgcaatagtgtgattaccacatctccacattcaatatattccctgaattatctgacgattttgatggctcactgttttcccaagtcttgaattgtcttctgtgcgccagtcaaatgcatatgtgttgagtttatcttttaaatatcaagcttttgtttttaacttttgtttgtaaccaaaaactcacagtaggagtttgatcacataattttatgtttgcctttgcaatttctagtgagtctttgattaaaagcttgaaaagaaaatgcagccaagcttaccaagtaagttatgtgtattaaccagaggaagagagaatcttgcaaaatttcaacaaacacaaaaagaagtattactacgattggtggagaaagaaaacgattccaaatcttgaactgttgttgtaaaagcatagcagaaagtgggagacaaccgaaatagaaatgactataacttaatttaatgttatcattataatttcttctagcaaatatttagaaagtaaatatcacatcaacctttaatgtaattaagctttctctttttgattcatgtgagatgaaaagaaaaaaaagaagagaaaagtgtagaaaacacatcatttctaagctgaaggcggccgcggtcaccccatacgattggaagcttcccgggcacccagctttcttgtacaaagtgggcattataagaaagcattgcttatcaatttgttgcaacgaacaggtcactatcagtcaaaataaaatcattatttgccatccagctgatatcccctatagtgagtcgtattacatggtcatagctgtttcctggcagctctggcccgtgtctcaaaatctctgatgttacattgcacaagataaaaatatatcatcatgaacaataaaactgtctgcttacataaacagtaatacaaggggtgttatgagccatattcaacgggaaacgtcgaggccgcgattaaattccaacatggatgctgatttatatgggtataaatgggctcgcgataatgtcgggcaatcaggtgcgacaatctatcgcttgtatgggaagcccgatgcgccagagttgtttctgaaacatggcaaaggtagcgttgccaatgatgttacagatgagatggtcagactaaactggctgacggaatttatgcctcttccgaccatcaagcattttatccgtactcctgatgatgcatggttactcaccactgcgatccccggaaaaacagcattccaggtattagaagaatatcctgattcaggtgaaaatattgttgatgcgctggcagtgttcctgcgccggttgcattcgattcctgtttgtaattgtccttttaacagcgatcgcgtatttcgtctcgctcaggcgcaatcacgaatgaataacggtttggttgatgcgagtgattttgatgacgagcgtaatggctggcctgttgaacaagtctggaaagaaatgcataaacttttgccattctcaccggattcagtcgtcactcatggtgatttctcacttgataaccttatttttgacgaggggaaattaataggttgtattgatgttggacgagtcggaatcgcagaccgataccaggatcttgccatcctatggaactgcctcggtgagttttctccttcattacagaaacggctttttcaaaaatatggtattgataatcctgatatgaataaattgcagtttcatttgatgctcgatgagtttttctaatcagaattggttaattggttgtaacactggcagagcattacgctgacttgacgggacggcgcaagctcatgaccaaaatcccttaacgtgagttacgcgtcgttccactgagcgtcagac

SEQ ID NO: 124 - DNA, 2000 bp, Glycine max
acatagccccaaaaccactattgaatatcaattagaaattggaagggttacttaaccttccattaaacatacaagtttccccatgataatagggatcaaaaataatgatcagggattcattccaaagaaaagtttacaaaatcaattttcgctcattttataggagttaaacccatttttaagccaaaaacctttacgtataaacaacattttaaaagttatttttcaataaaagcatcttttagagtttactgtttttatggcatattcaccccagtacagtttatattgctttcgtttaaacaggagttcatgaatttctaaaaaaaatgtttatgatacttgtcatttcgattgttcatatggtgcctgtcagataattaatgtctccgtggtgtttaactgttaagtagttgattttttgtcatgtaatcttgtaaatgacaattctatcgttaatcaaacaatccgtatacacacacacacacggagaaactagtgtgggtttgaccaaggaccctgaattcttcttctttgtataaggtcaggcaagtggtagagttcgaatagtaagttttgaagtttaaagcttgtacacaaaatatatatatatatatattgataaagaatggatataattgttttacaacgtgcagcgagggaacccttcaatacgcacctctctaccaagtctaacttaaaaacacagaattatcaaacacccaatttatgtgttagaatgtcttgcttttcgctactactattgtctggtgggcatgatgattttctcacaaaataattggaatattccacttatctctggctgatcttttttcttacatttaagacaatagagagtattaaatttgttataatcgtaatatttatatattaaatagtatttatggtatatttaaatatatatatatatagaatattattttatatatgcatattatagttattgttaattcagcatgtgttctggtttctgaaataaaataaaaaaacaaaaatttgaaaaatagaaactagaataaaaaaaatcaataaaaaggacctcacttattattttgactgttactaattacggaaataagttacttaaatgtattaaattaatttttgaaaattaatgcattaaagaaacttatttaatgtattaaataagtatttaatgcatttcaggaaaaagcatttaatgtattaaatacagtttagaaattaatttttgtttcattttttatttataaaattatgttttctttttacatatttgtaaaattatttggagagatgaaaaaaaatgtgtaaaaagaaagagtctaccaacaagtagttagtccaaatagtattgaattcaaattttttaaataaagttttgttaaaattaattatgaataaaattgatagataattctaacataattacacaaaaaaatctttaatcataatactccctttagacctcaaatgtaaaaaaaataaaaaaaaaatcaattgtgttagattaaaatataaacaaattttaattaactatcacctactttatcacctacttaatgatgtattttcaaaacatcattcgtttaattgagttttatttttaataatcttatttttttttcttatataatcaatatagatgatattttaaggaataaattaactttttattgaaattatcaaaattaaataatattaactaattttttgtctaatggttgagtccagagagagtaatatttgtgggtggagttttactggtggatgtggacaggtgtgagccacatgttaccatgcagtgagtcagaaaaaagaagtggcaggatatccggcgggttcacggcttggaagttgcaataaatattaaatgaggatgcagatattcttcttctgtcggtggtatgatatatatatatatataaggccgggcagaaaggaaaggaaatactattacatagcagaagcaaagaaaatactattactagctaatgagt

SEQ ID NO: 125 - DNA, 1500 bp, Arabidopsis thaliana
tttattttatatgtttaattttatagaatctaactagcttattttgagattaaattgtttagttacttttataacagtataaatgtataatgaggacctaagaatgtagtcctgtaatgttcttgctattctacttaatctcatcaccaatcaaccatcaaaagaagctagtactaataaaacctgcaggtattcgaataataattaagctcaaacactatactaatttatggaggattatatattcaatgaattaggaacctcatgatggacattattgactgatataatgtgtatactaattgtgagtatttaaaaaccatacaaagcatttatatgtccacatatattggacacacatgcaatcaatgttcaatatgctccacacacagaaataaaaatactctttctgatcatatgatacatcatacatatactaaaaaaatctaaaatgaactataaccacaagcatatataataacaatgaaatggtaatgtttcttcatttttatttgttcaaattcttattcggttgttttttcttaccctacgagaatccgtgaggtcaaagggaaacagtgattttttttttgtattttgttttttaaattgatgaactgtaaaactctctctctagaaaaatatataagtagtagtatgaattttctctcactaaaagcattaatggacctttcgataatcataaatgcaatgcaccctctctatgcatttcgcaataactccttttccttctgccacatcctcttcctcacctctttctcttcttccctttctcctaagttcctcctccaccaaattctccatttatttcgttaactatcctccatttgttttcttctgaagagtgatatattctacctttctctggttaaagaaactccctgaatccaccggttatgtcttgaccggctataagcctataaactgatgccctaagacacctttttaggtttctcaataattctccgcatctatcttttcttctccacaagtaagagaaccagaaaaccagagaagaagccgagctagctagggtttcattgtgtgcacaaaagtaagatctctctctctaaccaatacttgtgtaatttgtctttgtttctttgagcaaatattgcatgtttgttcatattagccggatccgttttatattttttcatgatctacattttatctttattttgtttgtaaattaatgagttttttttttttttttctgtttttgtcacgatctaaaaaacaagcgttacaaagaagaagaaaaacctttttggagttagaagtgtaaaaggggtttcagtttgacgaattttccttagtagttgtgtaaaaaaaggccattgacttaatgtcaactctatatatctacacatttttttattaattagtttttgtttttttcccacttcatttacctttagtcaatgaatttttactgaaaacgttttttcaaggtcaatttcactgagttaaaaaaaa

SEQ ID NO: 126 - DNA, 1130 bp, Arabidopsis thaliana
atatcggttgttgacgattaaccatgcaaaaaagaaacattaattgcgaatgtaaataacaaaacatgtaactcttgtagatatacatgtatcgacatttaaacccgaatatatatgtatacctataatttctctgattttcacgctacctgccacgtacatgggtgataggtccaaactcacaagtaaaagtttacgtacagtgaattcgtctttttgggtataaacgtacatttaatttacacgtaagaaaggattaccaattctttcatttatggtaccagacagagttaaggcaaacaagagaaacatatagagttttgatatgttttcttggataaatattaaattgatgcaatatttagggatggacacaaggtaatatatgccttttaaggtatatgtgctatatgaatcgtttcgcatgggtactaaaattatttgtccttactttatataaacaaattccaacaaaatcaagtttttgctaaaactagtttatttgcgggttatttaattacctatcatattacttgtaatatcattcgtatgttaacgggtaaaccaaaccaaaccggatattgaactattaaaaatcttgtaaatttgacacaaactaatgaatatctaaattatgttactgctatgataacgaccatttttgtttttgagaaccataatataaattacaggtacgtgacaagtactaagtatttatatccacctttagtcacagtaccaatattgcgcctaccgggcaacgtgaacgtgatcatcaaatcaaagtagttaccaaacgctttgatctcgataaaactaaaagctgacacgtcttgctgtttcttaatttatttctcttacaacgacaattttgagaaatatgaaatttttatatcgaaagggaacagtccttatcatttgctcccatcacttgcttttgtctagttacaactggaaatcgaagagaagtattacaaaaacatttttctcgtcatttataaaaaaatgacaaaaaattaaatagagagcaaagcaagagcgttgggtgacgttggtctcttcattaactcctctcatctaccccttcctctgttcgcctttatatccttcaccttccctctctcatcttc

SEQ ID NO: 127 - DNA, 663 bp, Gnetum gnemon
atggaagaaaacagcaacagcagcagaagcagcaacagcggcgcacgttggaatccgacgccggagcagctgagcattctgaaagagctgtatcatggccgcggaatcaggtcgcccagcgccgaacagatccaccatatctcatggaaactcagctcctacggcaaaatcgagggcaagaacgtcttctactggttccagaaccataaggcccgccagcgtcaaaaagagcgtctcggttccgtcatgcctgcttctgcttcttcttcttcttttgcatctccttctcagggagctgtcggcattcgaaggggaagtacggtgctatgtcttaaggaaacttcagcttcatcttcatcttattcttctgttccgcgttcggtatcagctgtgcgccagtgtgctgcatctcgtgactgtggcttgcaccatgatctgacaactctggagctgtttcccctgcaccgtgaaagtagaatagacgctggggaggaagacgaggagcaacaggaggtggtggtgctagataataataataacacctggacaaggcaccaaaatgtaaatgtgaatcatgcaaataatgacgatgagccacagcatggtcatgggcagattgatattgatgtagggcttcgtctttgcctcggtggatttcgctga

SEQ ID NO: 128 - protein, 220 aa, Gnetum gnemon
MEENSNSSRSSNSGARWNPTPEQLSILKELYHGRGIRSPSAEQIHHISWKLSSYGKIEGKNVFYWFQNHKARQRQKERLGSVMPASASSSSFASPSQGAVGIRRGSTVLCLKETSASSSSYSSVPRSVSAVRQCAASRDCGLHHDLTTLELFPLHRESRIDAGEEDEEQQEVVVLDNNNNTWTRHQNVNVNHANNDDEPQHGHGQIDIDVGLRLCLGGFR

SEQ ID NO: 129 - DNA, 987 bp, Malus domestica
atggaccctcaacagaacccaaatgaagtacaagaaggaggcaacaggcaggggggtggaatcatgtgcaggcaaagcagtacgcggtggacacccacaactgatcagataaaaatcttgaaggacctttactacaacaatggcattaggtcacccagcgctgagcagattcagaggatctctgctaagctgcgacagttcggcaagatcgaaggcaagaacgttttctattggtttcagaaccacaaagctcgtgagaggcagaagaaaagattcacttcttcttctgctcctgatcaccatcatcatgcagcaccaccagtgccagctgtaccaccagaatccaataatatcaggcaaagatcatcaggggttgggattgatattaatgcaactgctgctgctgcttatgaacaagcacccattaatcaccaccgcaagtattccaacatttctgctccaccagccgggttttcttctgcatcttcttcttcagttggtgtgaatgtttctgttggggcacagatgggaaactatgggtatggatccattgctatggagaagagctttagggagtgctcaatatcatctggaggaagtactagcactggtcatgtgggtggatctaattataatacttttaatcacaactatggatcatgggttggtgttgatccatattcctcgccctacactatctttgacaagaaatcctcatcaaaaccagtgtttggtgaccaggaaaatatgacggaagaagaatactacaatctgcaagcttcccaagagattgagactctcccactcttccccatgcacggtgaagacattcatggctttggcaacatcaagtcatcctctatggatggctactactccggctggtacaggtccgatggcggcaacgatggtggctctcgcacttcccttgagcttagcctcaattcctacggtcacatgacccatgattacttcagatcatattga

SEQ ID NO: 130 - protein, 328 aa, Malus domestica
MDPQQNPNEVQEGGNRQGGGIMCRQSSTRWTPTTDQIKILKDLYYNNGIRSPSAEQIQRISAKLRQFGKIEGKNVFYWFQNHKARERQKKRFTSSSAPDHHHHAAPPVPAVPPESNNIRQRSSGVGIDINATAAAAYEQAPINHHRKYSNISAPPAGFSSASSSSVGVNVSVGAQMGNYGYGSIAMEKSFRECSISSGGSTSTGHVGGSNYNTFNHNYGSWVGVDPYSSPYTIFDKKSSSKPVFGDQENMTEEEYYNLQASQEIETLPLFPMHGEDIHGFGNIKSSSMDGYYSGWYRSDGGNDGGSRTSLELSLNSYGHMTHDYFRSY

SEQ ID NO: 131 - DNA, 867 bp, Manihot esculenta
atggaacctcaacaacaacagcagcagcagcaaaaccaacaacaaccaaacgatgacaatagcagcggtgccaaaggaaactttctttgcaggcaaagcagtactaggtggactcccacaactgaccaaataagaatattgaaggacctttactacaacagtggagttaggtccccaagtgcagagcagattcagaggatatctgctaggcttagacagtacggtaagattgaaggcaagaatgtcttttattggtttcagaaccataaagctcgtgagaggcagaagaaaaggttcaccactgatgtccccatgcaacaaagaactgtttcgaatgcttctagttggaagcctgaagactattccttccacaacaaataccccaacattgctcctgggttttcttctgcatctccatcctcagctgctgggcttcctgttggacagatgggaaactatgggtatggatctgtaactatggagaagagttttagggactgctcaatatcagctactgccaacggtggtgttggtggatccatgagccccaactgtgggtgggttggcattgatccctactgttcatcctactctctctttgacaagcaaaaatcaactaatgaaaccctagaagatgaagaacaagatcaagatcaagaagaggaagcaactccagggattgaaaccctccctctcttccctacccagagagaagacatcaatggcttctgcaacatgaagcaccaccccatctgctactccgaaaactactgctatggctctgacgatggaaacaacgcttcgcgtacttccctcgaacttagcctcaactcttacagcaatgggcaggcacgggattccatctaa

SEQ ID NO: 132 - protein, 288 aa, Manihot esculenta
MEPQQQQQQQQNQQQPNDDNSSGAKGNFLCRQSSTRWTPTTDQIRILKDLYYNSGVRSPSAEQIQRISARLRQYGKIEGKNVFYWFQNHKARERQKKRFTTDVPMQQRTVSNASSWKPEDYSFHNKYPNIAPGFSSASPSSAAGLPVGQMGNYGYGSVTMEKSFRDCSISATANGGVGGSMSPNCGWVGIDPYCSSYSLFDKQKSTNETLEDEEQDQDQEEEATPGIETLPLFPTQREDINGFCNMKHHPICYSENYCYGSDDGNNASRTSLELSLNSYSNGQARDSI

SEQ ID NO: 133 - DNA, 960 bp, Kalanchoe fedtschenkoi
atggaagctcaacagcaacagcataatacaatgatgggtgatgaccttggcggtggcaagttggcagccaccagcttcacaagagcgcaaaccaacagcagcaacaaccacagcctagttaataacaacggcggcagaagaagcagcacgaggtggacaccaacaacagaccagataagaatactcaaagatctttactacaacaatggagtgaggtctcccacggtggagcagattcagaggatctctgctaggttgagacagtacggtaagatcgagggcaaaaatgtcttctactggtttcagaaccaaaaggctcgtgaaagacagaagaggaggttcaacacaaccagcaccaccaacaacaacactgctcccgctcctctccctccatcttctactgtttgtaaaccttcttcgctagactcatccactccacacattcacactgcagcagcagctgctgctgctgcctccaaatactcagacatcaacaacaaccaaaaccttatctacccagctgggcacaatcagatgtcaggtttcggatatgctgcctccgtaacaatggagaagagcttcagagattgttctatatcgacgggcgggtcatctttcggttgggctaaaggaggaatgacagatcaccatctgtctcgtcatccctacccgcacacttcaccctatgcaatctacaaccagcggaaatcaataaacagtgatgagtatcacgagctactggcatcatcaacttcggatcatcatgaacatggggataatcggggtccggagattgaaaccctgccactatttcccatgcacggcgaggacatcaactacggcttctgccaccttaattcagccgagactgatggctggttcaatcgcgatgtgggtagtggctctcgtgcgtccctcgagctcagtctcaactcttacgcaggaatggaccacacctag

SEQ ID NO: 134 - protein, 319 aa, Kalanchoe fedtschenkoi
MEAQQQQHNTMMGDDLGGGKLAATSFTRAQTNSSNNHSLVNNNGGRRSSTRWTPTTDQIRILKDLYYNNGVRSPTVEQIQRISARLRQYGKIEGKNVFYWFQNQKARERQKRRFNTTSTTNNNTAPAPLPPSSTVCKPSSLDSSTPHIHTAAAAAAAASKYSDINNNQNLIYPAGHNQMSGFGYAASVTMEKSFRDCSISTGGSSFGWAKGGMTDHHLSRHPYPHTSPYAIYNQRKSINSDEYHELLASSTSDHHEHGDNRGPEIETLPLFPMHGEDINYGFCHLNSAETDGWFNRDVGSGSRASLELSLNSYAGMDHT

SEQ ID NO: 135 - DNA, 840 bp, Gossypium hirsutum
atggaaccccagcaacagcaacagcaaaaccaacaagctccaaatgaggattgtggtggtggcagtggcaaaggaagctttctttgcaggcaaagtagtacacggtggactcctaccactgaccagattagaatattgaaggacctttactacaacaatggagttaggtccccgagtgctgatcagattcaaaggatctctgctagacttagacagtacggaaaaatcgaaggcaagaatgtcttttattggtttcagaaccacaaggctcgtgagaggcagaagaaaaggttcaccaccacgactaatcatcatgtccccatgcaaagccctaccactgctgcaaataacaagtatcccaacataactcctggttattctcctacatctctttcttcaactggtgctcttactgttgggcagataggaaactatggctatgggtctataactatggaaaagagttttagggattgctcaatatcagcatgtggtagtagtacaagtgtaggcgaatccctgagtcacaactttggatgggttgggttcgatcctacttattcttcgtcctacacattctttgagcacaaaaaattcatggaagagagacaaaaagatgaagatgatgcagaagaagaagctgctgctccacaaattgagaccctccctctctttcccatgcacagtgaagacgctaatggtttttgcagtaatattaggcccagactagacagctgctactctgggtggtacaggtctgaagatggctacactggttctcgtgcctcacttgagctcagcctcaacccatatgcaggcagaccgcaagattctatctga

SEQ ID NO: 136 - protein, 279 aa, Gossypium hirsutum
MEPQQQQQQNQQAPNEDCGGGSGKGSFLCRQSSTRWTPTTDQIRILKDLYYNNGVRSPSADQIQRISARLRQYGKIEGKNVFYWFQNHKARERQKKRFTTTTNHHVPMQSPTTAANNKYPNITPGYSPTSLSSTGALTVGQIGNYGYGSITMEKSFRDCSISACGSSTSVGESLSHNFGWVGFDPTYSSSYTFFEHKKFMEERQKDEDDAEEEAAAPQIETLPLFPMHSEDANGFCSNIRPRLDSCYSGWYRSEDGYTGSRASLELSLNPYAGRPQDSI

SEQ ID NO: 137 - DNA, 969 bp, Zostera marina
atggaacatcatcatcagcagcagttccacggtggccagccgcagctgatgagtgaaaatgaagagatgaacaacaatgggagcgggggtgggagtagtaagagcagttttctttgcagacagtcgagcacaaggtggatacccactactgatcagataaggatactgaaggatctatactacaacagtggactgagatccccaaacgccgatcagatccaaagaatatccgccagactgaggcagtacggaaagatcgagggtaagaatgttttctactggtttcaaaatcacaaagcccgagagaggcagaagaagagactcaccgtcgatattgctgcagcggcaactaccaacaaattctccaacaacactaatatgtcttcttcttcttctccctcagggatttctcctgcttctcatgcagtgtatgcaggattagggcagatggggagcaatggcggtggatcagtcgtgatggagagaacttcttacatggagtgttccttgccaggtgggatgccgatgcccgtacctgaacccaatgtgggagtcggagtgggatgggtgagtgttgaaacaggagctactactatgcaacaattctactaccatcaacagagaccaaccacaccctttcctgctcctcatcatcaccaccattactacgacgacggttactattccaataataacaaacttcaagcccatcacctacatatacgcgaggaaaatcaacatccagaagatgacgacgaagaagaagaagaagaagaagaagatgaagagatagaaacacttccattgttcccaatccactcacaggagacacagtcttacttcctggaccaacaacatgcaatccacaatcaagaaagcaataacatggaaacctctttggagctcaccctaaactcctactatgctgcttccagtagcagtactccacatggatcagagcatgattaa

SEQ ID NO: 138 - protein, 322 aa, Zostera marina
MEHHHQQQFHGGQPQLMSENEEMNNNGSGGGSSKSSFLCRQSSTRWIPTTDQIRILKDLYYNSGLRSPNADQIQRISARLRQYGKIEGKNVFYWFQNHKARERQKKRLTVDIAAAATTNKFSNNTNMSSSSSPSGISPASHAVYAGLGQMGSNGGGSVVMERTSYMECSLPGGMPMPVPEPNVGVGVGWVSVETGATTMQQFYYHQQRPTTPFPAPHHHHHYYDDGYYSNNNKLQAHHLHIREENQHPEDDDEEEEEEEEDEEIETLPLFPIHSQETQSYFLDQQHAIHNQESNNMETSLELTLNSYYAASSSSTPHGSEHD

SEQ ID NO: 139 - DNA, 693 bp, Amborella trichopoda
atggatcattctgataactgcccaggtaacaacaacaactctggttctggttctggttctggaaccaagtctggttacatgtgcagacaatctaactctagatggatcccaaccgctgaacaaatcagaatccttagagaactttactactctaacggtgttagatctccaaccgctgaacaaatccaaagaatctctgctagacttagacaatacggtaagatcgaaggtaagaacgttttttactggtttcaaaaccataaggctagagaaagacaaaagaagagacttaccgttgatcttgctgttcaaagagctgctgctacctctggtggtcttccaccaggtgttcttaacgtttctcatatcgctggttctacctgcggttctgttcttatggaatcttctcttatggattgctgctctacctctgctcttgaaaaccataacggtagaaaggaaagagctaacggtgatatgatcgttgaaagagaaagatctgctccaggtaaggaaacccttcaactttttccaatgcatcattctccacaaaacgatgataccatcgctgatgattacttttttaacgatgaagaagaaaagccagtttgcatggcttctcttgaacttacccttaactcttttgatagagtttaccatccagattctgattttagatctcattcttcttaa

SEQ ID NO: 140 - protein, 230 aa, Amborella trichopoda
MDHSDNCPGNNNNSGSGSGSGTKSGYMCRQSNSRWIPTAEQIRILRELYYSNGVRSPTAEQIQRISARLRQYGKIEGKNVFYWFQNHKARERQKKRLTVDLAVQRAAATSGGLPPGVLNVSHIAGSTCGSVLMESSLMDCCSTSALENHNGRKERANGDMIVERERSAPGKETLQLFPMHHSPQNDDTIADDYFFNDEEEKPVCMASLELTLNSFDRVYHPDSDFRSHSS

SEQ ID NO: 141 - DNA, 834 bp, Aquilegia coerulea
atggaacctcaacaagatcccaataaccaacaacaacaacttcaacaacaacaacatgaagaaaacagcagtggaagtagtagcaaaagcagttttctttgcaggcaaactagtacaaggtggacacccacaagtgatcagataagaatcttgaaagacctttactacaacaatggagttaggtctccaagtgcagagcaaatacagagaatctcagcaaggttaaggcagtacggtaagattgaaggcaagaatgttttctattggtttcagaaccacaaagctcgtgagagacaaaagaagagattcacaaatgatacaacaaccatgtccatgcaaagagctactactgcaactggtcatgccaaatacattactacttctcctgggatttcatctccatcttctgctggtgtacttggtgttggacagatgggaagcaacatgggatatggatctgttgttatggagaagagttttagagactgttcaatatctcctgctgctggtggtggtggtggtggtggcagtaatatgggtggatatggatccatgaacaacaattttggttggattggtgcgggtgtcgagccatatccatttttcaacaagacaaagcatattcaaaaatatgaagaagaagatttctcccaaactgagattgaaacactaccactatttcccatgcatggtgaagacagtacaaggtttggttcatctggcaacccaaacccgaattggaactggtttcgaacaggagatgaaatgattggatctagaacatcattggagcttagcttgaattcttactctggcgggtcaattaataactga

SEQ ID NO: 142 - protein, 277 aa, Aquilegia coerulea
MEPQQDPNNQQQQLQQQQHEENSSGSSSKSSFLCRQTSTRWTPTSDQIRILKDLYYNNGVRSPSAEQIQRISARLRQYGKIEGKNVFYWFQNHKARERQKKRFTNDTTTMSMQRATTATGHAKYITTSPGISSPSSAGVLGVGQMGSNMGYGSVVMEKSFRDCSISPAAGGGGGGGSNMGGYGSMNNNFGWIGAGVEPYPFFNKTKHIQKYEEEDFSQTEIETLPLFPMHGEDSTRFGSSGNPNPNWNWFRTGDEMIGSRTSLELSLNSYSGGSINN

SEQ ID NO: 143 - DNA, 969 bp, Amaranthus hypochondriacus
atggagtttcaacaacaacaagatgaagagatgataaaccatgttgggaaaatgagcaacaacacaagtaacaataataataataataataactatttatgtagacaaagtagcacaagatggactccaacaacagaacaaataaagcttttaaaagatctttattatttacaaggaattagatctcctactgctgatcaaattcaaagcatttgtgctaggttacgtcgttatggaaaaattgaaggcaaaaatgttttttattggtttcaaaatcataaggctagggaaagacaaaaaaagaagcttactcctacttctcctaataataataataataataataataataatttcataagaaataataataataataataataatggaaatattaacacttttcatgctaaatatccttgttccttcaataataatcccggggtttcttgttcaagttcaccagcaggtgtgatttctggaggtgggcaattgatggggagttttgggtatggagctgtgactatggagactaaatttagggtaagaggaggtattcctattccaaatggagcaaatcaatggagtaactatttcaacccaaacaatccaacatcttactcaaatttctttattgacaaggtatcatcaaatgttgatcatcattatccatacattaaccatcatgatcatgatcatgatcatgatcatcatgatcatgatcattatggcccacaatcacctcatgagattcagactcttcctctctttcccatgcacaatgatcatcatgatctcgatctcgatctcgatctcgatcacgatcaagggttctacacctataagcctcaatcggacggctgtaattataccggaggatatcgatggtcatctaatgttaatggtggacatacttctcttgagcttagtcttaactcttatggatttggatgctattcacctaattaa

SEQ ID NO: 144 - protein, 322 aa, Amaranthus hypochondriacus
MEFQQQQDEEMINHVGKMSNNTSNNNNNNNNYLCRQSSTRWTPTTEQIKLLKDLYYLQGIRSPTADQIQSICARLRRYGKIEGKNVFYWFQNHKARERQKKKLTPTSPNNNNNNNNNNFIRNNNNNNNNGNINTFHAKYPCSFNNNPGVSCSSSPAGVISGGGQLMGSFGYGAVTMETKFRVRGGIPIPNGANQWSNYFNPNNPTSYSNFFIDKVSSNVDHHYPYINHHDHDHDHDHHDHDHYGPQSPHEIQTLPLFPMHNDHHDLDLDLDLDHDQGFYTYKPQSDGCNYTGGYRWSSNVNGGHTSLELSLNSYGFGCYSPN

SEQ ID NO: 145 - DNA, 924 bp, Cucumis sativus
atggaacatcctgccaaacaacaacaacaagaacaaggaattaatgatcaaggtggtgaaggtggtggtggaagcaatggaaaaggtgggtttttgtgtaggcaaagtagcagtcgatggactccaacaactgaccaaatacgaatattgaaagagctttattataacaatggtgttcgctccccaagcgctgatcaaattcagaggatctctgctaggcttagacagtacggtaaaatcgaaggcaaaaacgttttttattggtttcaaaaccataaggctcgtgaaagacagaagaaaagattcacttcaaattctacttctcctattactacctccaatactactacaactactactgattttaaaatttcttcaactaataataatattaactggaagtctgaagatcattcctcctcttctcataacaaatttcctccaggaataacaattgctttaattgattcttgtttttgcagctccttcttcttcggttatggtcgccgttggccatatgggaaattacggatatgggagtgttcaatatcgtcgggaggaaatagcagtgtcgtcggttaccggagccacaacatgggatcatggatcggtatcgatccgtattcttctccggcagctgccgcggcggggggatcagccaatgtgtttgaaaaaacaaaatatgttgaagaaagcatggaagatcacgaggagcaagagatcgaaactctcccccttttccccattcatggtgaccggaataatctcggtggtttctgcagcatgaagccggaatattcagagagctactacaccaccacttggtacgggcggtctgacgataatggagccgccggttctcgggcttcgctggaactcagcctcaactcttacgccaccatctcacctgatgatggaatgtga

SEQ ID NO: 146 - protein, 307 aa, Cucumis sativus
MEHPAKQQQQEQGINDQGGEGGGGSNGKGGFLCRQSSSRWTPTTDQIRILKELYYNNGVRSPSADQIQRISARLRQYGKIEGKNVFYWFQNHKARERQKKRFTSNSTSPITTSNTTTTTTDFKISSTNNNINWKSEDHSSSSHNKFPPGITIALIDSCFCSSFFFGYGRRWPYGKLRIWECSISSGGNSSVVGYRSHNMGSWIGIDPYSSPAAAAAGGSANVFEKTKYVEESMEDHEEQEIETLPLFPIHGDRNNLGGFCSMKPEYSESYYTTTWYGRSDDNGAAGSRASLELSLNSYATISPDDGM

SEQ ID NO: 147 - DNA, 840 bp, Pinus taeda
atggaatctgctgaaagaatcggttcttacgatgtttacagacaaccatcttctaccagatggaacccaacctctgaacaactttctatccttagagaactttactacaccaacggtatcagatctccaaccgttgatgaaatccatagaatctctatgaagctttctagatacggtaagatcgaaggtaagaacgttttttactggtttcaaaaccataaggctagacatagacaaaagaccagactttctgctatgaacgttggtaagccagctgcttctccagctctttctcaaaccaccagaaagcataagcaatgctacatcaccaccaacatcgttcttacccttaaccaacattgctacaccaagaccaacatggttcttcaaatcatctggtctcttggtcttggtaacaagtctcaaaccaccaagatggtttgggaaatcaagatcaccgcttttccaaccatccataccgaatctttttacgaaaacagaatggctggtgaaaactcttcttgcaaggaagctgcttgctgctctcttgaacaaatgtacgctgttaagcatcatgatgttatgaaggctatggaagaaaaccaacttcaagaaggtaagatcaacagacatgttgaaacccttgaactttttccaacccattgcgaagatagatctccagaaccatctgaaaagaagtcttgctgctggggttcttgcgaaaccaaggaaaaccataacaacaacccaccaggtggttacaagggtaagcaaagagattctgttcttgatctttgcctttctcttggtaacaagtcttgcggtcttcatgataactaa

SEQ ID NO: 148 - protein, 279 aa, Pinus taeda
MESAERIGSYDVYRQPSSTRWNPTSEQLSILRELYYTNGIRSPTVDEIHRISMKLSRYGKIEGKNVFYWFQNHKARHRQKTRLSAMNVGKPAASPALSQTTRKHKQCYITTNIVLTLNQHCYTKTNMVLQIIWSLGLGNKSQTTKMVWEIKITAFPTIHTESFYENRMAGENSSCKEAACCSLEQMYAVKHHDVMKAMEENQLQEGKINRHVETLELFPTHCEDRSPEPSEKKSCCWGSCETKENHNNNPPGGYKGKQRDSVLDLCLSLGNKSCGLHDN

SEQ ID NO: 149 - DNA, 1500 bp, Arabidopsis thaliana
tggcaacttcaatgaattctgaatttaaaacatttttttttatatatatagatgatttggcgattttcgaactggaatggtgaaaaagtggttgagtacactattagtttatttatttaaaaaatagagggaaattcaaatgaaaaaaaaagtttcatctacagaaaaaaaaacacgtcaaaattccaaaaaacttgaacgtcttgaacaacggtataaccgtataagaaagggaacttaaaacttaaacgtctacatgattgaaagggtaaaaatattcatattacaatggtataagaaaatggagaagccagaggagcaactccaaagaagaagatgcagcaagagagtgtacattattataattataagttggtatatatgtagttgctaaaaaaaaaaaagagtgtacaatattttctgaagaagcatcgagctggttaatatttaagacccaccaaaacctaccaacaatgttattctcatctctaagcaaaagtttgatctcatctttttttttaattttttttttgatgggtcctcttctacctctgcatctccacgtgctatacaagtggcctcgctgtatgtattatttaccactctcttattgttactaaaaacttgaatgtcacttgaatgtcacttgaatgcaaactatatatttaggtgaataccagatcaaatagcaataaataaaccaacaatttatgctaattaaaaacttgaaaaaacactttccattacctatgattttttaatccaatcttggggtttgatgcccataaaacgaagtcgaaaagagaaaagcgaccttaattgtaataaatgcagctattgacttctctatcaacttcaagtcttcaagtaactacaaatttaataatctccttagcttatcttagagaagcacaaaacaaaagggtctacgcttagtcttcctagattcttgatttgagtcttgatggccacttgctttttatgtctcaatcctaagagttgatacttacttagtattaatcaggtttcacattatctcagacctagcttgcatttttgatacaaacatgtcatgcaatacacataagcaacacgtaccgagtcattgattgaaaaacatgacctaaatagtaatacggactgagagagagtgatgaatcatttcatatgggagacagctttctcatacgcgtccatgcctttgcatgaaagattaaataattcaactctttcacttatcttattttaatttactttgcagaattccaagttttattgcaatcaccaggggtattaaatgggatagtgtaaatgcacctgcaacacatcaactaaccacacactcctccacctgtttgtatttacttcaaaaacttaattcaaaaatccctttgcttctttccttccctctatttataaaccctagtatccggtttttattctaccacacaataccatttgcaacaaacttctctctgaatctcagtgaattctcataaa

SEQ ID NO: 150 - DNA, 1500 bp, Arabidopsis thaliana
tattaaactaattaaacttagcctttttcattagttttgttactggaaacggttcgtctttagtgcacaaagaccaaggtcaatttaattctttaataaattcaattgagagatcagaagcttgtgaatctggttctctctctctcttctcttactagcttttgagtcgacaaaagagagagaaaagatcattaaactcgaatccaaaacttcaaccaacaaaagggaaaaaaagaaaaaataactacaaagagatctatctttagggtttcaaaactttcttgagtttcagatcgaattgagtaagtatttatattatttaagtgttcttcttactgtatcatttctgaccatacaccaaactagggtttcttaaagatcataactctctctctctcgcttcttcctacactagatctgtccgatagatctgatgctttgagaagtcttgtgactttcaagattgatttttctttttgtttgtttgtttatatgtacacatacttggagatagatatactctcatatatgttactgtgcatatggatggatccatcttaagtgtgaataaaaactacccaaatctcatttttgtttgtttcttatctcatttgttgtttttgtaaggccgtcattataaatctaaaacaatttatccgttttcgtaaagaaaatcgctttccaaaaaaaaaaactttgaagtaaaaatatcattttgggtctatattcaaatctctcctcatatttccatctcattatttgtaaaattaatatattaggtcattatcatattgattatagagtttatatgttatgttataaagtaaaagttatatatgtaaatattacgtttgtaatatatatatttatacatatgtacgtatacataatttgtatgtatatgtgcctcatttttaacaaatattatcgttaatctttagtttcattataattttttagggatgtatacattatataaatattttatgttatttatatctgaaatttctatactataacatcttagatagttttcatacgtaattaagagttttaattaatagttacataattatgattagatgaatttatctataaattgtatgcaaaaatatatacatatccaaccgaaaaaatggagagtaaacaaaaacctaacaattaatggtttagtacttgtgaaaatgataaaattattaatttaatatatagtttcataacagctagaaataactttcccttaatataattattttcttccatttccataatgattttcttcttcttcattctgtatacatatatgagcgtttcatatataatcttttactaattcgattgtgattttgattttgggcagtggaagatatacttggagaagaaaatcaaatcacgaaaatatattgatcagtgccttgaaggaaaccaaagttgacaactccaaaaatccatttcgttattaatatctaactgagtgatcatagtcaatcatccataaca

SEQ ID NO: 151 - DNA, 1500 bp, Arabidopsis thaliana
tccattaattcatgtacacaaatttatttgtttaaagtatcattggatccattacacttcagttttcttagcatctttataaaactctcactttcatgatgttttttttttataatttaatatatcctgtatgttgaattttcagttagtcatctatattttgtcttaaattttgccttctttagcattaattaattgatttcttgcctctaatatctttcattcctctcctaatttgctttctgactttctgatttattgtattcttctttaaataatcttatcaatttctgcatagtcagagatgaaaccttcaagaaaacaataaagaggaaagattaaaggttagtattcccttgcctaccaaaaaaaacagaaaggtttgtattctcttcgtatatccttattttcattatacgtttggttttatatataaacacgtgtatatactttatagtagtagtatacatttacatattaatgtgtgtaataaaaacgtttaaatacgatgatgatgataagaaatagctggaaaaaattaatacatcacccaggccttatgtcacgttggttgtaagttgtataataactatatgttggtccgtcgcacaggtgcacagatataatactatttttttcatttcaatttttttttctttcttaatcgccaaatagtagtttacactttttcctgaagagtttttattttttgaaaatctactaatgattatatttaattaaattttgttttgttctcacgaaaatattgtttttttaataaacaggatagagttgggaatttatttgtacctactttttcccattttatttgctttgaacaaatgagtccaacatttctcttttcgtcttctctttcctatcccatctaaatcaaaactgatcaaaatacctcgaaattttaaattaaatcaccatccatcaaagctattatagtgtagaaattttaaagttttttctttggacaacaattgatttccatctacactacatatgatatgactcttgaatcaatcatagtttttatttcagtctgctgattagtttttttcttttcttttaaaagggtaaaaaatcggtagtttcgaataattttgagtatgtgaaaattcattatttttgggttggttattcaataacaaattaatttgtgattgtgatgtcttttttatgcaaggctcttttttcttgctttcaattagtgggtcctttgtttcctacaatcatctccaattcttctgtttgcttatatcattttgtatgatcttcaagaagaaagataaacgactccgaagaaagatttaagttattgttgttcatacaaaaagaaggttgtaaagttgttgacgtggacaaaagtattgccatatttttccagcctcgaagaaatttcccttcttcttcaaaccctaaattttgacaaaactctctacttttttttgcttctagggtttgctttcagtttccggagtataagaaaag

SEQ ID NO: 152 - DNA, 1905 bp, Arabidopsis thaliana
tttgagccaacagtcggaaaacaaccatcacttagcatttttttatttttaatactactatttttttttttgtaattagtcgagtgtaccaatcccaaatttaatgggtatctttcataaccaaaaagaaaaaagcacaaaaacaaaatactactactatactataatggtgaaacacacattacattagcattaaccgctattccttaaaagatatatgagcagactacaaggaagtacatttaaatcagtgtgctaagttttctcaattatcaatctaataattgtacttacataaatttaccaaatcatctcaccatttagggcatacaatttttgctcaataatggagcttgaaaagactaattatagaatgtctttttggttgacacaagctcgcttcttcatgtcgtttactttaaaaattgtagattctttcacaacttataagattctatagcctatttgattatcctttaggatgatgagtataatatctcaaactataaaataaaaatgttcacatcaataattgaaaaaaaatgcatgtatgaattcacgaaaatatggttacggttgtgtgttgctgctagacaaaagtctttcatatattcagttatatttcttaaaactaatcaaaattgttttatgcaattttggcgagtagagagaaaaagcgcgtgggataaataaagaaaggcgttataaaaaaagagaaaaagtcaaccgagtagttctggtaagagagtctcgtgcattcgtaaggtttccaagagtccacatatctatttcatcatcctcttaacgtttttctcacttacttttttccccactcttaattgattccgttgataaaatttgttcgttatatagaaataatcagaatataattagggttaattttggagtaaagaccattcaatcaatggtttggcttgattcttgtttgaaattctatgtttaaaaagggtaatacttacaaacttgactttattagtattttaaaaaatgacaaaacttaaaatggatttgaaatctagcatatttaactttaatacagttttggtttaagtttcactctcttttctatcaaaaatataattttaaaatttgaaagatgttaaaatagacaaatgtcattagtttgttcagatttagttatgtttttaatatacagacaattatattaaaataataataaaaaagtcagatcagttataaaagaaagtcagttcagttttaagacttaagtttgagtcttttggatttgaatttaatagattcacttttattaaaaattgttgaaacactttttaaaaactaaaacatttgtcaaaaaatgcatttaaccaaaaaaatgaaaatgaaaggtagtaagtaataaaagaagaaaacaaaatctaaaaaagtgtctttaaaatctcaaaattaaaatatacaaaaaagtacaagaaaataaaagaaaagggggaaaaagagagtcaatatcaacatgcaagtgtgaatattagactcttcttctctcatcagttaccccaaaactagggtttacccattttcatcatcttcttcttccccacatcactctctgaaagacaataagagagagagacacacacaccaaaaaaaaaaccccattgatttttaagagagagagagagactgagaacgaagagcaaatgagagagaagttgaatcaaatttccgctttcgttctctttctctctcctccatttcagtaataaacactccttcctctttaatttttctgggtttcttcttcttccctcttttgttgtttctgtgtgattcagttctcgatccatcttttcgtgaaaagtatcaatcttttaattctctagttgtttgtcaaatctggttagtttcttctcttgtatttatttg

SEQ ID NO: 153 - DNA, 11210 bp, Artificial Sequence
  RV021090 T-DNA
aattacaacggtatatatcctgtcagccaacaccaaaacatcaaaaaaatcgggatcaggatcaggatctgcggccgcatcctgcaggagctcaaacgagcaggaagcaacgagagggtggcgcgcgaccgacgtgcgtacgtagcatgagcctgagtggagacgttggacgtgtatgtatatacctctctgcgtgttaactatgtacgtaagcggcaggcagtgcaataagtgtggctctgtagtatgtacgtgcgggtacgatgctgtaagctactgaggcaagtccataaataaataatgacacgtgcgtgttctataatctcttcgcttcttcatttgtccccttgcggagtttggcatccattgatgccgttacgctgagaacagacacagcagacgaaccaaaagtgagttcttgtatgaaactatgacccttcatcgctaggctcaaacagcaccccgtacgaacacagcaaattagtcatctaactattagcccctacatgtttcagacgatacataaatatagcccatccttagcaattagctattggccctgcccatcccaagcaatgatctcgaagtatttttaatatatagtatttttaatatgtagcttttaaaattagaagataattttgagacaaaaatctccaagtatttttttgggtattttttactgcctccgtttttctttatttctcgtcacctagtttaattttgtgctaatcggctataaacgaaacagagagaaaagttactctaaaagcaactccaacagattagatataaatcttatatcctgcctagagctgttaaaaagatagacaactttagtggattagtgtatgcaacaaactctccaaatttaagtatcccaactacccaacgcatatcgttcccttttcattggcgcacgaactttcacctgctatagccgacgtacatgttcgttttttttgggcggcgcttactttcttccccgttcgttctcagcatcgcaactcaatttgttatggcggagaagcccttgtatcccaggtagtaatgcacagatatgcattattattattcataaaacgaacgctcttcaactggaagagcggttactaccggttcactagctagctgctaatcgagctagttaccctatgaggtgacatgaagcgctcacggttactatgacggttagcttcacgactgttggtggcagtagcgtacgacttagctatagttccggacttacctagctaggttaccagagctggtcaccttcttcatcgctaagaagacactcagtagtccggaccgatatcgctatcaactttgtatagaaaagttgggccagaatggcccggaccgggttaccaagcggccgcgaattccagaagaccaaagggcaattgagacttttcaacaaagggtaatatcgggaaacctcctcggattccattgcccagctatctgtcacttcatcaaaaggacagtagaaaaggaaggtggcacctacaaatgccatcattgcgataaaggaaaggctatcgttcaagatgcctctgccgacagtggtcccaaagatggacccccacccacgaggagcatcgtggaaaaagaagacgttccaaccacgtcttcaaagcaagtggattgatgtgatatctccactgacgtaagggatgacgcacaatcccactatccttcgcaagacccttcctctatataaggaagttcatttcatttggagaggacccatggaaactcaacaacaacaagcagatattcaagattttgggaacaaaaacagtaacacctatgcatgcaggcaaagcagtactaggtggacacccacaagtgatcagatcagaatactgaaagagctctactacaacaatggaatcagatcaccaactgctgatcagattcagagaatcgctgctcaactcagacagtacggcaagattgaaggcaagaacgtgttttattggtttcagaaccataaagctcgtgaacgccagaagaaacggttcactcctactgctcctccaccaccgtctcacttctccgatcatattaaccaccatcttcccaacgctgcccccatgcagattccgtctcaccaccaccactaccaccatcaagaaccaccacatgtctatgctcaccctcacaaactctacaccactcatcacattggggttggttcttcttcacaaggagtgatgggtgtagggtgtggctatggatctgttgctatggagaagagtttcaggaagtgttcaatatcaccaccgggagagagtaaggccacaggaggaattggccggaatatcggttcaagatcacggataagtgtcgattcgtgttccttcttcgacacaattaagccaaagacatatgagatgtttgagaatcatgatcaagatgaagaacaaggagagccttcaactgagatcgaaacacttccattattcccgattcacgacggcaaccatcatgatttcttcggcatgaggacggcaaatctgcaattggagcaaggcactggaggttactacactggaggaagctggtatcggtctgatgagagggcgtctcttgagctcagtctcaactcatatggttattataactaattcgaactggccaggtacctgacatcttatagtctgcaacctctcgtgtctgaattcctatctttatcaagtgttattgcttccacgactataggacagctttcgtcgaaaggttttgctcatgtgatctcgaaggattcatctagtctgatttttcgtgacttgtatcggttttattggattcatccaacatatatcaataaaaaatgagttgtgtttcctttcttcctagttcagttaaaattatttccctcctgcgcttgtgctgtaattgtctgtgtacctgttgtttgtgactgtgttagttcccttggatatgatttcgtatttgatatgtacatggagatagcttagcttcattattggagtatgaagttagtatgacatagtcactctcctggaaaattgacactgcaaaccatatttttattctgaaccacaaatcctagtcagtccgctggcatatgccgtccgtttgctgaatccagaacgtgggtttggagatgtacggctgagatgcctctatgcgaaggggatttcgtggtgaaacgagatgggagtagagcaacgcccgtggaagatgcttcaaacttccacacttttgagcaacgatcggcagtagtaaggtagacgatttcaagatcaaagcatatgaagataaacaacatcaacaacaaaatttgttggggttctatagagagaaacagagctacatacatacactgttttgtatctaccatctgagatgatgaaaagatgaaaaactaaagaatgccccggcgccaacgccaggacacgccgcgcgcgcgtcacccgagccatctcttgacccagccggcgctgtatatttacacacgttgcagcatcgatcaccacctgttcgatcgcgtcgccgtcaccaagcttggcgcgccggtcacccggtccgggcctagaaggccacccggggctcggcgttaggcttttagtccgctaggtggctagaccgaggttaggacgctagttcactaggggcctagtggtgttttaaggatgggcaagtttgtacaaaaaagcaggctggcgccggaaccaattcagtcgagtgcggccgccagtgtgatggatatctcgacccgggtgattgcggttacatcatgtacggaaaaataattctaatccttgatttaaatttgaacttgactatttatttattctttatttcattttgtaaatcattttatgtatctcctggcaagcaattttatccaccttgcaccaacaccttcgggttccataatcaaaccaccttaacttcacaccatgctgtaactcacaccgcccagcatctccaatgtgaaagaagctaaaatttaataaacaatcatacgaagcagtgacaaaataccagatggtattaatgcttcgataaaattaattggaaagtataaaatggtagaaaataataaattataattaatttaagtaagataaaaaataattaaaaactaaaatgttaaaattttaaaaaaattattttaaataatatttaaaaacattaaaaatcattttaaaaaatttatttatagaacaattaaataaatatttcagctaataaaaaacaaaagcttacctagccttagaagacaacttgtccaacaattagatgatacccattgcccttacgttttctttaacatcaattattgtttttgtcaacaagctatcttttagttttattttattggtaaaaaatatgtcgccttcaagttgcatcatttaacacatctcgtcattagaaaaataaaactcttccctaaacgattagtagaaaaaatcattcgataataaataagaaagaaaaattagaaaaaaataacttcattttaaaaaaatcattaaggctatattttttaaatgactaattttatatagactgtaactaaaagtatacaatttattatgctatgtatcttaaagaattacttataaaaatctacggaagaatatcttacaaagtgaaaaacaaatgagaaagaatttagtgggatgattatgattttatttgaaaattgaaaaaataattattaaagactttagtggagtaagaaagctttcctattagtcttttcttatccataaaaaaaaaaaaaaaaatctagcgtgacagcttttccatagattttaataatgtaaaatactggtagcagccgaccgttcaggtaatggacactgtggtcctaacttgcaacgggtgcgggcccaatttaataacgccgtggtaacggataaagccaagcgtgaagcggtgaaggtacatctctgactccgtcaagattacgaaaccgtcaactacgaaggactccccgaaatatcatctgtgtcataaacaccaagtcacaccatacatgggcacgcgtcacaatatgattggagaacggttccaccgcatatgctataaaatgcccccacacccctcgaccctaatcgcacttcaattgcaatcaaattagttcattctctttgcgcagttccctacctctcctttcaaggttcgtagatttcttccgtttttttttcttcttctttattgtttgttctacatcagcatgatgttgatttgattgtgttttctatcgtttcatcgattataaattttcataatcagaagattcagcttttattaatgcaagaacgtccttaattgatgattttataaccgtaaattaggtctaattagagtttttttcataaagattttcagatccgtttacaacaagccttaattgttgattctgtagtcgtagattaaggtttttttcatgaactacttcagatccgttaaacaacagccttatttgttgatacttcagtcgtttttcaagaaattgttcagatccgttgataaaagccttattcgttgattctgtatggtatttcaagagatattgctcaggtcctttagcaactaccttatttgttgattctgtggccatagattaggattttttttcacgaaattgcttcttgaaattacgtgatggattttgattctgatttatcttgtgattgttgactctacagccatggcccacagcaagcacggcctgaaggaggagatgaccatgaagtaccacatggagggctgcgtgaacggccacaagttcgtgatcaccggcgagggcatcggctaccccttcaagggcaagcagaccatcaacctgtgcgtgatcgagggcggccccctgcccttcagcgaggacatcctgagcgccggcttcaagtacggcgaccggatcttcaccgagtacccccaggacatcgtggactacttcaagaacagctgccccgccggctacacctggggccggagcttcctgttcgaggacggcgccgtgtgcatctgtaacgtggacatcaccgtgagcgtgaaggagaactgcatctaccacaagagcatcttcaacggcgtgaacttccccgccgacggccccgtgatgaagaagatgaccaccaactgggaggccagctgcgagaagatcatgcccgtgcctaagcagggcatcctgaagggcgacgtgagcatgtacctgctgctgaaggacggcggccggtaccggtgccagttcgacaccgtgtacaaggccaagagcgtgcccagcaagatgcccgagtggcacttcatccagcacaagctgctgcgggaggaccggagcgacgccaagaaccagaagtggcagctgaccgagcacgccatcgccttccccagcgccctggcctgagagctcgaatttccccgatcgttcaaacatttggcaataaagtttcttaagattgaatcctgttgccggtcttgcgatgattatcatataatttctgttgaattacgttaagcatgtaataattaacatgtaatgcatgacgttatttatgagatgggtttttatgattagagtcccgcaattatacatttaatacgcgatagaaaacaaaatatagcgcgcaaactaggataaattatcgcgcgcggtgtcatctatgttactagatcgggaattctagtggccggcccagctgatatctagacccagctttcttgtacaaagtggccgttaacggatctggccgcggccgcatcaggatattcttgtttaagatgttgaactctatggaggtttgtatgaactgatgatctaggaccggataagttcccttcttcatagcgaacttattcaaagaatgttttgtgtatcattcttgttacattgttattaatgaaaaaatattattggtcattggactgaacacgagtgttaaatatggaccaggccccaaataagatccattgatatatgaattaaataacaagaataaatcgagtcaccaaaccacttgccttttttaacgagacttgttcaccaacttgatacaaaagtcattatcctatgcaaatcaataatcatacaaaaatatccaataacactaaaaaattaaaagaaatggataatttcacaatatgttatacgataaagaagttacttttccaagaaattcactgattttataagcccacttgcattagataaatggcaaaaaaaaacaaaaaggaaaagaaataaagcacgaagaattctagaaaatacgaaatacgcttcaatgcagtgggacccacggttcaattattgccaattttcagctccaccgtatatttaaaaaataaaacgataatgctaaaaaaatataaatcgtaacgatcgttaaatctcaacggctggatcttatgacgaccgttagaaattgtggttgtcgacgagtcagtaataaacggcgtcaaagtggttgcagccggcacacacgagtcgtgtttatcaactcaaagcacaaatacttttcctcaacctaaaaataaggcaattagccaaaaacaactttgcgtgtaaacaacgctcaatacacgtgtcattttattattagctattgcttcaccgccttagctttctcgtgacctagtcgtcctcgtcttttcttcttcttcttctataaaacaatacccaaagagctcttcttcttcacaattcagatttcaatttctcaaaatcttaaaaactttctctcaattctctctaccgtgatcaaggtaaatttctgtgttccttattctctcaaaatcttcgattttgttttcgttcgatcccaatttcgtatatgttctttggtttagattctgttaatcttagatcgaagacgattttctgggtttgatcgttagatatcatcttaattctcgattagggtttcatagatatcatccgatttgttcaaataatttgagttttgtcgaataattactcttcgatttgtgatttctatctagatctggtgttagtttctagtttgtgcgatcgaatttgtcgattaatctgagtttttctgattaacagccatggctgcaactactcttacatctgctttacctggtgctttcagttcatcccagagaccaagtgctcctttcaacttacaaagatcacctagagtgcttagaaggttcaacagaaagacaggacgtcaacctcgtggacttgttcgtgctgcaaaggctcaagcggcgcaaaacctgccagagaaattcgatgaaacaagactctgggaggccctcaggggatttggggttagtccaagtagggttacttacgctcccgtcggattcggagattaccactggaccgtcacagatgaagacgggagaccttggttcgcaactgtcagtgacctcgaacacaaagagcattgcgggcagggagcacaagcagcccttaaaggactcagacaagctatggacactgccctcgcacttagagatagggacggactcagattcgtggttgctccagtggcagcaacagatgggggtggccctgtccttccccttgacgctaggtatgcactcacagtcttccctcacgtcccaggaagaacaggagagttcggacaaagactcacagaggcagagagggacagactgcttgctcttctggcagaactccacggaagaacacctcctgaaacaaccccaccagccgatatggaaccaccaggacttcctggtgttagagcagcactcgccgaaagtgaaggaccttggagtggaggaccatttgcagaacccgctagacttcttctcagagaacacgaggccacactgcacgcaagactcgctgaattcgaagccctcgtcgcaagagttaagggtcgtggagcacctcttgtcgttacccacggagaaccacacccaggcaacttgatcctcggagaggaaggctatctcctcgtggactgggatacagttggactggctccagctgaaagggatttgagtctcatctcagacgacccagctgacctcgcaagatacgcagagcttacaggaagaactccagacccagacgcactcgcactctatagactgcgttggagtctccttgatgtggctgagttcgtcgagtggttcagggctgaacaccaaagaacccaagacaccgagagtgcatggaaggggttcactgacacacttgggcaattggctgctggtggatcagctgcatagcctaggaaacttatctctgttatgaatcagaagaagttcatgtctcgtttcatttaaaactttggtggtttgtgttttggggccttgtaaagcccctgatgaataattgttcaactatgtttccgttcctgtgttatacctttctttctaatgagtaatgacatcaaacttcttctgtattgaaattatgtccttgtgagtctctttatcatcgtttcgtctttacattatatgtgctacttttgtctaatgagcctgaaaagtggctccaatggtacgcactggaagatttgttggcttctggtagatatagcgacagtgttgagcttgtaatatcatgtctcttattgctaaattagttcctttcttaacagaaaccttcaaagtttttgtttttgttttcatttacctaatgtacacatacgctggccatgactaacaacatgtccaggcttagagcatatttttttctagcttaaattgttaacttgtcattcagtaaaatccgagaattgtgaagctctaattgaagctaattcgttttataaagtcagttaaaaagtatactaaattatccaacttttcttcaaaatctcaaaattctatgacaaaacgatagtctttgtttatgtcagtaccacaaagaggtggaaaaaaacaccaaaaaaacaataagcaaactatacactgagaagaaaaataaaagagagctcaatagatgttttatactaacggtagattagatcaaagatccaagctttactctacatagagcagaacccagaatcccttcatatctcttttattctagcaccgataatctactgaaaagaagacacttagagctctgtctctttgtcaaagaagtcccagccgtcatccagaagctccttacgttcattaacagaggtaccggcggccgcgggcaactttattatacaaagttgatagatatcggtccgacggccagaatggccatctggattcagcaggcctagaaggccatttagtcctagcgatcgcgctgacaagcggtatttaaatcatcattctaggcgcgccacttacgcttgattccgatgacttcgtaggttcctagctcaagccgctcgtgtccaagcgtcacttacgattagctaatgattacggcatctaggaccgactagttcttatgtgcttctagtctccaaatgtggttgatagttattttgctctaagatcaacagtaatgaagtataaatcatcgttgtggtgtgctactcggttaattgagcattaacacacacaaacatgacgaggatggtataatctccaaaaatgtgtactttgttaggtgggaccctatagccttgattaatgtgctatgttaggcatgcctggaaacgtgtgacgcatatgttttgtgaacctgttgatattatatgtgcttttatattaccatattttattaaaatactaatatttattactagtaagatataacattctatctagcttaaaaactaaccataaatattccataataactagatttaccaaactaatatactaaatatacataataaatacaaaattaacaagacaataatcaatatttatgagcttaatatatttagacattatggttggtcgacgataatcatgctaacttttcgtaattgcttgattgaaatatgcttagaataatgcctctttgttctacatggcaaatagggaccattatggtgtaacaccctgggaaccacaaacaccccgaaatgctactaaactacacaactaaccttcatatataaaatttcgacagcatctcctttgaaaatttgcatagacgtggaagcaacagagtataaacagatctagctagctaagtttaaacggccggccaaacgtgcaagcgctactagacaattcagtacattaaaaacgtccgcaatgtgttattaagttgtctaagcgtcaatttatttacaattgaatatatcctgcca

SEQ ID NO: 154 - DNA, 15172 bp, Artificial Sequence
  RV026522 T-DNA
caaacaaacatacacagcgatttattcacacgaacccgaattacaacggtatatatcctgtcagccaacaccaaaacatcaaaaaaatcgggatcaggatcaggatctgcggccgcatcctgcaggtttaaacggccggccttcactagctagctgctaagctcaaacgagcaggaagcaacgagagggtggcgcgcgaccgacgtgcgtacgtagcatgagcctgagtggagacgttggacgtgtatgtatatacctctctgcgtgttaactatgtacgtaagcggcaggcagtgcaataagtgtggctctgtagtatgtacgtgcgggtacgatgctgtaagctactgaggcaagtccataaataaataatgacacgtgcgtgttctataatctcttcgcttcttcatttgtccccttgcggagtttggcatccattgatgccgttacgctgagaacagacacagcagacgaaccaaaagtgagttcttgtatgaaactatgacccttcatcgctaggctcaaacagcaccccgtacgaacacagcaaattagtcatctaactattagcccctacatgtttcagacgatacataaatatagcccatccttagcaattagctattggccctgcccatcccaagcaatgatctcgaagtatttttaatatatagtatttttaatatgtagcttttaaaattagaagataattttgagacaaaaatctccaagtatttttttgggtattttttactgcctccgtttttctttatttctcgtcacctagtttaattttgtgctaatcggctataaacgaaacagagagaaaagttactctaaaagcaactccaacagattagatataaatcttatatcctgcctagagctgttaaaaagatagacaactttagtggattagtgtatgcaacaaactctccaaatttaagtatcccaactacccaacgcatatcgttcccttttcattggcgcacgaactttcacctgctatagccgacgtacatgttcgttttttttgggcggcgcttactttcttccccgttcgttctcagcatcgcaactcaatttgttatggcggagaagcccttgtatcccaggtagtaatgcacagatatgcattattattattcataaaatcgagctagttaccctatgaggtgacatgaagcgctcacggttactatgacggttagcttcacgactgttggtggcagtagcgtacgacttagctatagttccggacttacctaactgactagagtcacacttagctgaccctagtcacttaggcgcgccaagcttggatctcctgcaggatctggccggccggatgggcggatctcgtacctcaactttgtatagaaaagttgggccagaatggcccggaccgggttaccaagcggccgcgaattccagaagaccaaagggcaattgagacttttcaacaaagggtaatatcgggaaacctcctcggattccattgcccagctatctgtcacttcatcaaaaggacagtagaaaaggaaggtggcacctacaaatgccatcattgcgataaaggaaaggctatcgttcaagatgcctctgccgacagtggtcccaaagatggacccccacccacgaggagcatcgtggaaaaagaagacgttccaaccacgtcttcaaagcaagtggattgatgtgatatctccactgacgtaagggatgacgcacaatcccactatccttcgcaagacccttcctctatataaggaagttcatttcatttggagaggacccatggaagaaaacagcaacagcagcagaagcagcaacagcggcgcacgttggaatccgacgccggagcagctgagcattctgaaagagctgtatcatggccgcggaatcaggtcgcccagcgccgaacagatccaccatatctcatggaaactcagctcctacggcaaaatcgagggcaagaacgtcttctactggttccagaaccataaggcccgccagcgtcaaaaagagcgtctcggttccgtcatgcctgcttctgcttcttcttcttcttttgcatctccttctcagggagctgtcggcattcgaaggggaagtacggtgctatgtcttaaggaaacttcagcttcatcttcatcttattcttctgttccgcgttcggtatcagctgtgcgccagtgtgctgcatctcgtgactgtggcttgcaccatgatctgacaactctggagctgtttcccctgcaccgtgaaagtagaatagacgctggggaggaagacgaggagcaacaggaggtggtggtgctagataataataataacacctggacaaggcaccaaaatgtaaatgtgaatcatgcaaataatgacgatgagccacagcatggtcatgggcagattgatattgatgtagggcttcgtctttgcctcggtggatttcgctgaggtacctgacatcttatagtctgcaacctctcgtgtctgaattcctatctttatcaagtgttattgcttccacgactataggacagctttcgtcgaaaggttttgctcatgtgatctcgaaggattcatctagtctgatttttcgtgacttgtatcggttttattggattcatccaacatatatcaataaaaaatgagttgtgtttcctttcttcctagttcagttaaaattatttccctcctgcgcttgtgctgtaattgtctgtgtacctgttgtttgtgactgtgttagttcccttggatatgatttcgtatttgatatgtacatggagatagcttagcttcattattggagtatgaagttagtatgacatagtcactctcctggaaaattgacactgcaaaccatatttttattctgaaccacaaatcctagtcagtccgctggcatatgccgtccgtttgctgaatccagaacgtgggtttggagatgtacggctgagatgcctctatgcgaaggggatttcgtggtgaaacgagatgggagtagagcaacgcccgtggaagatgcttcaaacttccacacttttgagcaacgatcggcagtagtaaggtagacgatttcaagatcaaagcatatgaagataaacaacatcaacaacaaaatttgttggggttctatagagagaaacagagctacatacatacactgttttgtatctaccatctgagatgatgaaaagatgaaaaactaaagaatgccccggcgccaacgccaggacacgccgcgcgcgcgtcacccgagccatctcttgacccagccggcgctgtatatttacacacgttgcagcatcgatcaccacctgttcgatcgcgtcgccgtcaccaagcttggcgcgccggtcacccggtccgggcctagaaggccacccggggctcggcgttaggcttttagtccgctaggtggctagaccgaggttaggacgctagttcactaggggcctagtggtgttttaaggatgggcaagtttgtacaaaaaagcaggctggcgccggaaccaattcagtcgagtgcggccgccagtgtgatggatatctcgacccgggtgattgcggttacatcatgtacggaaaaataattctaatccttgatttaaatttgaacttgactatttatttattctttatttcattttgtaaatcattttatgtatctcctggcaagcaattttatccaccttgcaccaacaccttcgggttccataatcaaaccaccttaacttcacaccatgctgtaactcacaccgcccagcatctccaatgtgaaagaagctaaaatttaataaacaatcatacgaagcagtgacaaaataccagatggtattaatgcttcgataaaattaattggaaagtataaaatggtagaaaataataaattataattaatttaagtaagataaaaaataattaaaaactaaaatgttaaaattttaaaaaaattattttaaataatatttaaaaacattaaaaatcattttaaaaaatttatttatagaacaattaaataaatatttcagctaataaaaaacaaaagcttacctagccttagaagacaacttgtccaacaattagatgatacccattgcccttacgttttctttaacatcaattattgtttttgtcaacaagctatcttttagttttattttattggtaaaaaatatgtcgccttcaagttgcatcatttaacacatctcgtcattagaaaaataaaactcttccctaaacgattagtagaaaaaatcattcgataataaataagaaagaaaaattagaaaaaaataacttcattttaaaaaaatcattaaggctatattttttaaatgactaattttatatagactgtaactaaaagtatacaatttattatgctatgtatcttaaagaattacttataaaaatctacggaagaatatcttacaaagtgaaaaacaaatgagaaagaatttagtgggatgattatgattttatttgaaaattgaaaaaataattattaaagactttagtggagtaagaaagctttcctattagtcttttcttatccataaaaaaaaaaaaaaaaatctagcgtgacagcttttccatagattttaataatgtaaaatactggtagcagccgaccgttcaggtaatggacactgtggtcctaacttgcaacgggtgcgggcccaatttaataacgccgtggtaacggataaagccaagcgtgaagcggtgaaggtacatctctgactccgtcaagattacgaaaccgtcaactacgaaggactccccgaaatatcatctgtgtcataaacaccaagtcacaccatacatgggcacgcgtcacaatatgattggagaacggttccaccgcatatgctataaaatgcccccacacccctcgaccctaatcgcacttcaattgcaatcaaattagttcattctctttgcgcagttccctacctctcctttcaaggttcgtagatttcttccgtttttttttcttcttctttattgtttgttctacatcagcatgatgttgatttgattgtgttttctatcgtttcatcgattataaattttcataatcagaagattcagcttttattaatgcaagaacgtccttaattgatgattttataaccgtaaattaggtctaattagagtttttttcataaagattttcagatccgtttacaacaagccttaattgttgattctgtagtcgtagattaaggtttttttcatgaactacttcagatccgttaaacaacagccttatttgttgatacttcagtcgtttttcaagaaattgttcagatccgttgataaaagccttattcgttgattctgtatggtatttcaagagatattgctcaggtcctttagcaactaccttatttgttgattctgtggccatagattaggattttttttcacgaaattgcttcttgaaattacgtgatggattttgattctgatttatcttgtgattgttgactctacagccatggcccacagcaagcacggcctgaaggaggagatgaccatgaagtaccacatggagggctgcgtgaacggccacaagttcgtgatcaccggcgagggcatcggctaccccttcaagggcaagcagaccatcaacctgtgcgtgatcgagggcggccccctgcccttcagcgaggacatcctgagcgccggcttcaagtacggcgaccggatcttcaccgagtacccccaggacatcgtggactacttcaagaacagctgccccgccggctacacctggggccggagcttcctgttcgaggacggcgccgtgtgcatctgtaacgtggacatcaccgtgagcgtgaaggagaactgcatctaccacaagagcatcttcaacggcgtgaacttccccgccgacggccccgtgatgaagaagatgaccaccaactgggaggccagctgcgagaagatcatgcccgtgcctaagcagggcatcctgaagggcgacgtgagcatgtacctgctgctgaaggacggcggccggtaccggtgccagttcgacaccgtgtacaaggccaagagcgtgcccagcaagatgcccgagtggcacttcatccagcacaagctgctgcgggaggaccggagcgacgccaagaaccagaagtggcagctgaccgagcacgccatcgccttccccagcgccctggcctgagagctcgaatttccccgatcgttcaaacatttggcaataaagtttcttaagattgaatcctgttgccggtcttgcgatgattatcatataatttctgttgaattacgttaagcatgtaataattaacatgtaatgcatgacgttatttatgagatgggtttttatgattagagtcccgcaattatacatttaatacgcgatagaaaacaaaatatagcgcgcaaactaggataaattatcgcgcgcggtgtcatctatgttactagatcgggaattctagtggccggcccagctgatatctagacccagctttcttgtacaaagtggccgttaacggatcggccagaatggcccggaccgggttaccgaattcgagctcggtaccctgggatccgatatcgatgggccctggccgaagcttggtcacccggtccgggcctagaaggccagcttcggccgccccgggcaactttattatacaaagttgatggtacggatccgtcgacggcgcgccgcggacctgaattccagcacactggcggccgttagtctaaaaacggcccctaactaacgcttagttgcccgctagattagtcccccgttagtgcctagttagacacacgacgaactaggggctactagtaacggccgccagtgtgctcggtacggccagaatggccatctggattcagcagggggtgattgcggttacatcatgtacggaaaaataattctaatccttgatttaaatttgaacttgactatttatttattctttatttcattttgtaaatcattttatgtatctcctggcaagcaattttatccaccttgcaccaacaccttcgggttccataatcaaaccaccttaacttcacaccatgctgtaactcacaccgcccagcatctccaatgtgaaagaagctaaaatttaataaacaatcatacgaagcagtgacaaaataccagatggtattaatgcttcgataaaattaattggaaagtataaaatggtagaaaataataaattataattaatttaagtaagataaaaaataattaaaaactaaaatgttaaaattttaaaaaaattattttaaataatatttaaaaacattaaaaatcattttaaaaaatttatttatagaacaattaaataaatatttcagctaataaaaaacaaaagcttacctagccttagaagacaacttgtccaacaattagatgatacccattgcccttacgttttctttaacatcaattattgtttttgtcaacaagctatcttttagttttattttattggtaaaaaatatgtcgccttcaagttgcatcatttaacacatctcgtcattagaaaaataaaactcttccctaaacgattagtagaaaaaatcattcgataataaataagaaagaaaaattagaaaaaaataacttcattttaaaaaaatcattaaggctatattttttaaatgactaattttatatagactgtaactaaaagtatacaatttattatgctatgtatcttaaagaattacttataaaaatctacggaagaatatcttacaaagtgaaaaacaaatgagaaagaatttagtgggatgattatgattttatttgaaaattgaaaaaataattattaaagactttagtggagtaagaaagctttcctattagtcttttcttatccataaaaaaaaaaaaaaaaatctagcgtgacagcttttccatagattttaataatgtaaaatactggtagcagccgaccgttcaggtaatggacactgtggtcctaacttgcaacgggtgcgggcccaatttaataacgccgtggtaacggataaagccaagcgtgaagcggtgaaggtacatctctgactccgtcaagattacgaaaccgtcaactacgaaggactccccgaaatatcatctgtgtcataaacaccaagtcacaccatacatgggcacgcgtcacaatatgattggagaacggttccaccgcatatgctataaaatgcccccacacccctcgaccctaatcgcacttcaattgcaatcaaattagttcattctctttgcgcagttccctacctctcctttcaaggttcgtagatttcttccgtttttttttcttcttctttattgtttgttctacatcagcatgatgttgatttgattgtgttttctatcgtttcatcgattataaattttcataatcagaagattcagcttttattaatgcaagaacgtccttaattgatgattttataaccgtaaattaggtctaattagagtttttttcataaagattttcagatccgtttacaacaagccttaattgttgattctgtagtcgtagattaaggtttttttcatgaactacttcagatccgttaaacaacagccttatttgttgatacttcagtcgtttttcaagaaattgttcagatccgttgataaaagccttattcgttgattctgtatggtatttcaagagatattgctcaggtcctttagcaactaccttatttgttgattctgtggccatagattaggattttttttcacgaaattgcttcttgaaattacgtgatggattttgattctgatttatcttgtgattgttgactctacagccatggctgcaactactcttacatctgctttacctggtgctttcagttcatcccagagaccaagtgctcctttcaacttacaaagatcacctagagtgcttagaaggttcaacagaaagacaggacgtcaacctcgtggacttgttcgtgctgcaaaggctcaagcggcgcaaaacctgccagagaaattcgatgaaacaagactctgggaggccctcaggggatttggggttagtccaagtagggttacttacgctcccgtcggattcggagattaccactggaccgtcacagatgaagacgggagaccttggttcgcaactgtcagtgacctcgaacacaaagagcattgcgggcagggagcacaagcagcccttaaaggactcagacaagctatggacactgccctcgcacttagagatagggacggactcagattcgtggttgctccagtggcagcaacagatgggggtggccctgtccttccccttgacgctaggtatgcactcacagtcttccctcacgtcccaggaagaacaggagagttcggacaaagactcacagaggcagagagggacagactgcttgctcttctggcagaactccacggaagaacacctcctgaaacaaccccaccagccgatatggaaccaccaggacttcctggtgttagagcagcactcgccgaaagtgaaggaccttggagtggaggaccatttgcagaacccgctagacttcttctcagagaacacgaggccacactgcacgcaagactcgctgaattcgaagccctcgtcgcaagagttaagggtcgtggagcacctcttgtcgttacccacggagaaccacacccaggcaacttgatcctcggagaggaaggctatctcctcgtggactgggatacagttggactggctccagctgaaagggatttgagtctcatctcagacgacccagctgacctcgcaagatacgcagagcttacaggaagaactccagacccagacgcactcgcactctatagactgcgttggagtctccttgatgtggctgagttcgtcgagtggttcagggctgaacaccaaagaacccaagacaccgagagtgcatggaaggggttcactgacacacttgggcaattggctgctggtggatcagctgcatagcaaacttatctctgttatgaatcagaagaagttcatgtctcgtttcatttaaaactttggtggtttgtgttttggggccttgtaaagcccctgatgaataattgttcaactatgtttccgttcctgtgttatacctttctttctaatgagtaatgacatcaaacttcttctgtattgaaattatgtccttgtgagtctctttatcatcgtttcgtctttacattatatgtgctacttttgtctaatgagcctgaaaagtggctccaatggtacgcactggaagatttgttggcttctggtagatatagcgacagtgttgagcttgtaatatcatgtctcttattgctaaattagttcctttcttaacagaaaccttcaaagtttttgtttttgttttcatttacctaatgtacacatacgctggccatgactaacaacatgtccaggcttagagcatatttttttctagcttaaattgttaacttgtcattcagtaaaatccgagaattgtgaagctctaattgaagctaattcgttttataaagtcagttaaaaagtatactaaattatccaacttttcttcaaaatctcaaaattctatgacaaaacgatagtctttgtttatgtcagtaccacaaagaggtggaaaaaaacaccaaaaaaacaataagcaaactatacactgagaagaaaaataaaagagagctcaatagatgttttatactaacggtagattagatcaaagatccaagctttactctacatagagcagaacccagaatcccttcatatctcttttattctagcaccgataatctactgaaaagaagacacttagagctctgtctctttgtcaaagaagtcccagccgtcatccagaagctccttacgttcattaacagaggccgcaattggatcgggtttacttattttgtgggtatctatacttttattagatttttaatcaggctcctgatttctttttatttcgattgaattcctgaacttgtattattcagtagatcgaataaattataaaaagataaaatcataaaataatattttatcctatcaatcatattaaagcaatgaatatgtaaaattaatcttatctttattttaaaaaatcatataggtttagtatttttttaaaaataaagataggattagttttactattcactgcttattacttttaaaaaaatcataaaggtttagtatttttttaaaataaatataggaatagttttactattcactgctttaatagaaaaatagtttaaaatttaagatagttttaatcccagcatttgccacgtttgaacgtgagccgaaacgatgtcgttacattatcttaacctagctgaaacgatgtcgtcataatatcgccaaatgccaactggactacgtcgaacccacaaatcccacaaagcgcgtgaaatcaaatcgctcaaaccacaaaaaagaacaacgcgtttgttacacgctcaatcccacgcgagtagagcacagtaaccttcaaataagcgaatggggcataatcagaaatccgaaataaacctaggggcattatcggaaatgaaaagtagctcactcaatataaaaatctaggaaccctagttttcgttatcactctgtgctccctcgctctatttctcagtctctgtgtttgcggctgaggattccgaacgagtgaccttcttcgtttctcgcaaaggtaacagcctctgctcttgtctcttcgattcgatctatgcctgtctcttatttacgatgatgtttcttcggttatgtttttttatttatgctttatgctgttgatgttcggttgtttgtttcgctttgtttttgtggttcagttttttaggattcttttggtttttgaatcgattaatcggaagagattttcgagttatttggtgtgttggaggtgaatcttttttttgaggtcatagatctgttgtatttgtgttataaacatgcgactttgtatgattttttacgaggttatgatgttctggttgttttattatgaatctgttgagacagaaccatgatttttgttgatgttcgtttacactattaaaggtttgttttaacaggattaaaagttttttaagcatgttgaaggagtcttgtagatatgtaaccgtcgatagtttttttgtgggtttgttcacatgttatcaagcttaatcttttactatgtatgcgaccatatctggatccagcaaaggcgattttttaattccttgtgaaacttttgtaatatgaagttgaaattttgttattggtaaactataaatgtgtgaagttggagtatacctttaccttcttatttggctttgtgatagtttaatttatatgtattttgagttctgacttgtatttctttgaattgattctagtttaagtaatcatggcctcctccgagaacgtcatcaccgagttcatgcgcttcaaggtgcgcatggagggcaccgtgaacggccacgagttcgagatcgagggcgagggcgagggccgcccctacgagggccacaacaccgtgaagctgaaggtgacgaagggcggccccctgcccttcgcctgggacatcctgtccccccagttccagtacggctccaaggtgtacgtgaagcaccccgccgacatccccgactacaagaagctgtccttccccgagggcttcaagtgggagcgcgtgatgaacttcgaggacggcggcgtggcgaccgtgacccaggactcctccctgcaggacggctgcttcatctacaaggtgaagttcatcggcgtgaacttcccctccgacggccccgtgatgcagaagaagaccatgggctgggaggcctccaccgagcgcctgtacccccgcgacggcgtgctgaagggcgagacccacaaggccctgaagctgaaggacggcggccactacctggtggagttcaagtccatctacatggccaagaagcccgtgcagctgcccggctactactacgtggacgccaagctggacatcacctcccacaacgaggactacaccatcgtggagcagtacgagcgcaccgagggccgccaccacctgttcctgtagttttgtgatctgatgataagtggttggttcgtgtctcatgcacttgggaggtgatctatttcacctggtgtagtttgtgtttccgtcagttggaaaaacttatccctatcgatttcgttttcattttctgcttttcttttatgtaccttcgtttgggcttgtaacgggcctttgtatttcaactctcaataataatccaagtgcatgttaaacaatttgtcatctgtttcggctttgatatactactggtgaagatgggccgtactactgcatcacaacgaaaaataataataagatgaaaaacttgaagtggaaaaaaaaaaaaacttgaatgttcactactactcattgaccataatgtttaacatacatagctcaatagtatttttgtgaatatggcaacacaaacagtccaaaacaattgtctcttactataccaaaccaagggcgccgcttgtttgccactctttgtgtgcaatagtgtgattaccacatctccacattcaatatattccctgaattatctgacgattttgatggctcactgttttcccaagtcttgaattgtcttctgtgcgccagtcaaatgcatatgtgttgagtttatcttttaaatatcaagcttttgtttttaacttttgtttgtaaccaaaaactcacagtaggagtttgatcacataattttatgtttgcctttgcaatttctagtgagtctttgattaaaagcttgaaaagaaaatgcagccaagcttaccaagtaagttatgtgtattaaccagaggaagagagaatcttgcaaaatttcaacaaacacaaaaagaagtattactacgattggtggagaaagaaaacgattccaaatcttgaactgttgttgtaaaagcatagcagaaagtgggagacaaccgaaatagaaatgactataacttaatttaatgttatcattataatttcttctagcaaatatttagaaagtaaatatcacatcaacctttaatgtaattaagctttctctttttgattcatgtgagatgaaaagaaaaaaaagaagagaaaagtgtagaaaacacatcatttctaagctgaagctgaggtacaaattaattaataagtgactagggtcacgtgaccctagtcacttatgattccgatgacttcgtaggttcctagctcaagccgctcgtgtccaagcgtcacttacgattagctaatgattacggcatctaggaccgactagttcttatgtgcttctagtctccaaatgtggttgatagttattttgctctaagatcaacagtaatgaagtataaatcatcgttgtggtgtgctactcggttaattgagcattaacacacacaaacatgacgaggatggtataatctccaaaaatgtgtactttgttaggtgggaccctatagccttgattaatgtgctatgttaggcatgcctggaaacgtgtgacgcatatgttttgtgaacctgttgatattatatgtgcttttatattaccatattttattaaaatactaatatttattactagtaagatataacattctatctagcttaaaaactaaccataaatattccataataactagatttaccaaactaatatactaaatatacataataaatacaaaattaacaagacaataatcaatatttatgagcttaatatatttagacattatggttggtcgacgataatcatgctaacttttcgtaattgcttgattgaaatatgcttagaataatgcctctttgttctacatggcaaatagggaccattatggtgtaacaccctgggaaccacaaacaccccgaaatgctactaaactacacaactaaccttcatatataaaatttcgacagcatctcctttgaaaatttgcatagacgtggaagcaacagagtataaacagatctagctagctaagtttaaacggccggccaaacgtgcaagcgctactagacaattcagtacattaaaaacgtccgcaatgtgttattaagttgtctaagcgtcaatttatttacaattgaatatatcctgcca

SEQ ID NO: 155 - DNA, 15352 bp, Artificial Sequence
  RV026526 T-DNA
caaacaaacatacacagcgatttattcacacgaacccgaattacaacggtatatatcctgtcagccaacaccaaaacatcaaaaaaatcgggatcaggatcaggatctgcggccgcatcctgcaggtttaaacggccggccttcactagctagctgctaagctcaaacgagcaggaagcaacgagagggtggcgcgcgaccgacgtgcgtacgtagcatgagcctgagtggagacgttggacgtgtatgtatatacctctctgcgtgttaactatgtacgtaagcggcaggcagtgcaataagtgtggctctgtagtatgtacgtgcgggtacgatgctgtaagctactgaggcaagtccataaataaataatgacacgtgcgtgttctataatctcttcgcttcttcatttgtccccttgcggagtttggcatccattgatgccgttacgctgagaacagacacagcagacgaaccaaaagtgagttcttgtatgaaactatgacccttcatcgctaggctcaaacagcaccccgtacgaacacagcaaattagtcatctaactattagcccctacatgtttcagacgatacataaatatagcccatccttagcaattagctattggccctgcccatcccaagcaatgatctcgaagtatttttaatatatagtatttttaatatgtagcttttaaaattagaagataattttgagacaaaaatctccaagtatttttttgggtattttttactgcctccgtttttctttatttctcgtcacctagtttaattttgtgctaatcggctataaacgaaacagagagaaaagttactctaaaagcaactccaacagattagatataaatcttatatcctgcctagagctgttaaaaagatagacaactttagtggattagtgtatgcaacaaactctccaaatttaagtatcccaactacccaacgcatatcgttcccttttcattggcgcacgaactttcacctgctatagccgacgtacatgttcgttttttttgggcggcgcttactttcttccccgttcgttctcagcatcgcaactcaatttgttatggcggagaagcccttgtatcccaggtagtaatgcacagatatgcattattattattcataaaatcgagctagttaccctatgaggtgacatgaagcgctcacggttactatgacggttagcttcacgactgttggtggcagtagcgtacgacttagctatagttccggacttacctaactgactagagtcacacttagctgaccctagtcacttaggcgcgccaagcttggatctcctgcaggatctggccggccggatgggcggatctcgtacctcaactttgtatagaaaagttgggccagaatggcccggaccgggttaccaagcggccgcgaattccagaagaccaaagggcaattgagacttttcaacaaagggtaatatcgggaaacctcctcggattccattgcccagctatctgtcacttcatcaaaaggacagtagaaaaggaaggtggcacctacaaatgccatcattgcgataaaggaaaggctatcgttcaagatgcctctgccgacagtggtcccaaagatggacccccacccacgaggagcatcgtggaaaaagaagacgttccaaccacgtcttcaaagcaagtggattgatgtgatatctccactgacgtaagggatgacgcacaatcccactatccttcgcaagacccttcctctatataaggaagttcatttcatttggagaggacccatggaacctcaacaacagctccagcagcagcagcaacaaaaccaacaacagccaaacgaggatagcggcagcagcaaaggcagttttctgtgcaggcaaagcagtacacgctggactcctacaactgaccagataagaatattgaaggacctttactacaacaatggagttaggtccccaagtgctgaacagattcagaggatctcagctaggctgaggcagtacggcaagatcgaaggcaagaacgtcttttattggtttcagaaccataaagctcgtgaaaggcagaagaagcgattcactactgatatgcccatgcaaagatcccttggaaatgccggttggagacctgatgatcccattcacaacaaatttcataccattcccactcctgggatatcttccccatcttcttcttcttcacccagtgtgcttgctgttgggcagatgggaagctttggatatggatctgtggagaggagttttacagactgttcaatatcagcaggtggtggtcgtggtggggttggtggatctataaaccagagcttcgaatgggttggcatggacccatattcttcatcttatgcactctttgacaagagaaaaacaatgggtgaaagcttcgaagaagagcaagaagaagaagcaactccggagattgaaacgctcccactctttcccatgcacgctgaggatatcactggcttttgcaacattaagcccgaatccgacgcctactactccggctggtacaggcccgccgacgccaagaccagttcccgcacttctcttgagcttagcctcaactcctacgccggcaggtccccggattccccctgaggtacctgacatcttatagtctgcaacctctcgtgtctgaattcctatctttatcaagtgttattgcttccacgactataggacagctttcgtcgaaaggttttgctcatgtgatctcgaaggattcatctagtctgatttttcgtgacttgtatcggttttattggattcatccaacatatatcaataaaaaatgagttgtgtttcctttcttcctagttcagttaaaattatttccctcctgcgcttgtgctgtaattgtctgtgtacctgttgtttgtgactgtgttagttcccttggatatgatttcgtatttgatatgtacatggagatagcttagcttcattattggagtatgaagttagtatgacatagtcactctcctggaaaattgacactgcaaaccatatttttattctgaaccacaaatcctagtcagtccgctggcatatgccgtccgtttgctgaatccagaacgtgggtttggagatgtacggctgagatgcctctatgcgaaggggatttcgtggtgaaacgagatgggagtagagcaacgcccgtggaagatgcttcaaacttccacacttttgagcaacgatcggcagtagtaaggtagacgatttcaagatcaaagcatatgaagataaacaacatcaacaacaaaatttgttggggttctatagagagaaacagagctacatacatacactgttttgtatctaccatctgagatgatgaaaagatgaaaaactaaagaatgccccggcgccaacgccaggacacgccgcgcgcgcgtcacccgagccatctcttgacccagccggcgctgtatatttacacacgttgcagcatcgatcaccacctgttcgatcgcgtcgccgtcaccaagcttggcgcgccggtcacccggtccgggcctagaaggccacccggggctcggcgttaggcttttagtccgctaggtggctagaccgaggttaggacgctagttcactaggggcctagtggtgttttaaggatgggcaagtttgtacaaaaaagcaggctggcgccggaaccaattcagtcgagtgcggccgccagtgtgatggatatctcgacccgggtgattgcggttacatcatgtacggaaaaataattctaatccttgatttaaatttgaacttgactatttatttattctttatttcattttgtaaatcattttatgtatctcctggcaagcaattttatccaccttgcaccaacaccttcgggttccataatcaaaccaccttaacttcacaccatgctgtaactcacaccgcccagcatctccaatgtgaaagaagctaaaatttaataaacaatcatacgaagcagtgacaaaataccagatggtattaatgcttcgataaaattaattggaaagtataaaatggtagaaaataataaattataattaatttaagtaagataaaaaataattaaaaactaaaatgttaaaattttaaaaaaattattttaaataatatttaaaaacattaaaaatcattttaaaaaatttatttatagaacaattaaataaatatttcagctaataaaaaacaaaagcttacctagccttagaagacaacttgtccaacaattagatgatacccattgcccttacgttttctttaacatcaattattgtttttgtcaacaagctatcttttagttttattttattggtaaaaaatatgtcgccttcaagttgcatcatttaacacatctcgtcattagaaaaataaaactcttccctaaacgattagtagaaaaaatcattcgataataaataagaaagaaaaattagaaaaaaataacttcattttaaaaaaatcattaaggctatattttttaaatgactaattttatatagactgtaactaaaagtatacaatttattatgctatgtatcttaaagaattacttataaaaatctacggaagaatatcttacaaagtgaaaaacaaatgagaaagaatttagtgggatgattatgattttatttgaaaattgaaaaaataattattaaagactttagtggagtaagaaagctttcctattagtcttttcttatccataaaaaaaaaaaaaaaaatctagcgtgacagcttttccatagattttaataatgtaaaatactggtagcagccgaccgttcaggtaatggacactgtggtcctaacttgcaacgggtgcgggcccaatttaataacgccgtggtaacggataaagccaagcgtgaagcggtgaaggtacatctctgactccgtcaagattacgaaaccgtcaactacgaaggactccccgaaatatcatctgtgtcataaacaccaagtcacaccatacatgggcacgcgtcacaatatgattggagaacggttccaccgcatatgctataaaatgcccccacacccctcgaccctaatcgcacttcaattgcaatcaaattagttcattctctttgcgcagttccctacctctcctttcaaggttcgtagatttcttccgtttttttttcttcttctttattgtttgttctacatcagcatgatgttgatttgattgtgttttctatcgtttcatcgattataaattttcataatcagaagattcagcttttattaatgcaagaacgtccttaattgatgattttataaccgtaaattaggtctaattagagtttttttcataaagattttcagatccgtttacaacaagccttaattgttgattctgtagtcgtagattaaggtttttttcatgaactacttcagatccgttaaacaacagccttatttgttgatacttcagtcgtttttcaagaaattgttcagatccgttgataaaagccttattcgttgattctgtatggtatttcaagagatattgctcaggtcctttagcaactaccttatttgttgattctgtggccatagattaggattttttttcacgaaattgcttcttgaaattacgtgatggattttgattctgatttatcttgtgattgttgactctacagccatggcccacagcaagcacggcctgaaggaggagatgaccatgaagtaccacatggagggctgcgtgaacggccacaagttcgtgatcaccggcgagggcatcggctaccccttcaagggcaagcagaccatcaacctgtgcgtgatcgagggcggccccctgcccttcagcgaggacatcctgagcgccggcttcaagtacggcgaccggatcttcaccgagtacccccaggacatcgtggactacttcaagaacagctgccccgccggctacacctggggccggagcttcctgttcgaggacggcgccgtgtgcatctgtaacgtggacatcaccgtgagcgtgaaggagaactgcatctaccacaagagcatcttcaacggcgtgaacttccccgccgacggccccgtgatgaagaagatgaccaccaactgggaggccagctgcgagaagatcatgcccgtgcctaagcagggcatcctgaagggcgacgtgagcatgtacctgctgctgaaggacggcggccggtaccggtgccagttcgacaccgtgtacaaggccaagagcgtgcccagcaagatgcccgagtggcacttcatccagcacaagctgctgcgggaggaccggagcgacgccaagaaccagaagtggcagctgaccgagcacgccatcgccttccccagcgccctggcctgagagctcgaatttccccgatcgttcaaacatttggcaataaagtttcttaagattgaatcctgttgccggtcttgcgatgattatcatataatttctgttgaattacgttaagcatgtaataattaacatgtaatgcatgacgttatttatgagatgggtttttatgattagagtcccgcaattatacatttaatacgcgatagaaaacaaaatatagcgcgcaaactaggataaattatcgcgcgcggtgtcatctatgttactagatcgggaattctagtggccggcccagctgatatctagacccagctttcttgtacaaagtggccgttaacggatcggccagaatggcccggaccgggttaccgaattcgagctcggtaccctgggatccgatatcgatgggccctggccgaagcttggtcacccggtccgggcctagaaggccagcttcggccgccccgggcaactttattatacaaagttgatggtacggatccgtcgacggcgcgccgcggacctgaattccagcacactggcggccgttagtctaaaaacggcccctaactaacgcttagttgcccgctagattagtcccccgttagtgcctagttagacacacgacgaactaggggctactagtaacggccgccagtgtgctcggtacggccagaatggccatctggattcagcagggggtgattgcggttacatcatgtacggaaaaataattctaatccttgatttaaatttgaacttgactatttatttattctttatttcattttgtaaatcattttatgtatctcctggcaagcaattttatccaccttgcaccaacaccttcgggttccataatcaaaccaccttaacttcacaccatgctgtaactcacaccgcccagcatctccaatgtgaaagaagctaaaatttaataaacaatcatacgaagcagtgacaaaataccagatggtattaatgcttcgataaaattaattggaaagtataaaatggtagaaaataataaattataattaatttaagtaagataaaaaataattaaaaactaaaatgttaaaattttaaaaaaattattttaaataatatttaaaaacattaaaaatcattttaaaaaatttatttatagaacaattaaataaatatttcagctaataaaaaacaaaagcttacctagccttagaagacaacttgtccaacaattagatgatacccattgcccttacgttttctttaacatcaattattgtttttgtcaacaagctatcttttagttttattttattggtaaaaaatatgtcgccttcaagttgcatcatttaacacatctcgtcattagaaaaataaaactcttccctaaacgattagtagaaaaaatcattcgataataaataagaaagaaaaattagaaaaaaataacttcattttaaaaaaatcattaaggctatattttttaaatgactaattttatatagactgtaactaaaagtatacaatttattatgctatgtatcttaaagaattacttataaaaatctacggaagaatatcttacaaagtgaaaaacaaatgagaaagaatttagtgggatgattatgattttatttgaaaattgaaaaaataattattaaagactttagtggagtaagaaagctttcctattagtcttttcttatccataaaaaaaaaaaaaaaaatctagcgtgacagcttttccatagattttaataatgtaaaatactggtagcagccgaccgttcaggtaatggacactgtggtcctaacttgcaacgggtgcgggcccaatttaataacgccgtggtaacggataaagccaagcgtgaagcggtgaaggtacatctctgactccgtcaagattacgaaaccgtcaactacgaaggactccccgaaatatcatctgtgtcataaacaccaagtcacaccatacatgggcacgcgtcacaatatgattggagaacggttccaccgcatatgctataaaatgcccccacacccctcgaccctaatcgcacttcaattgcaatcaaattagttcattctctttgcgcagttccctacctctcctttcaaggttcgtagatttcttccgtttttttttcttcttctttattgtttgttctacatcagcatgatgttgatttgattgtgttttctatcgtttcatcgattataaattttcataatcagaagattcagcttttattaatgcaagaacgtccttaattgatgattttataaccgtaaattaggtctaattagagtttttttcataaagattttcagatccgtttacaacaagccttaattgttgattctgtagtcgtagattaaggtttttttcatgaactacttcagatccgttaaacaacagccttatttgttgatacttcagtcgtttttcaagaaattgttcagatccgttgataaaagccttattcgttgattctgtatggtatttcaagagatattgctcaggtcctttagcaactaccttatttgttgattctgtggccatagattaggattttttttcacgaaattgcttcttgaaattacgtgatggattttgattctgatttatcttgtgattgttgactctacagccatggctgcaactactcttacatctgctttacctggtgctttcagttcatcccagagaccaagtgctcctttcaacttacaaagatcacctagagtgcttagaaggttcaacagaaagacaggacgtcaacctcgtggacttgttcgtgctgcaaaggctcaagcggcgcaaaacctgccagagaaattcgatgaaacaagactctgggaggccctcaggggatttggggttagtccaagtagggttacttacgctcccgtcggattcggagattaccactggaccgtcacagatgaagacgggagaccttggttcgcaactgtcagtgacctcgaacacaaagagcattgcgggcagggagcacaagcagcccttaaaggactcagacaagctatggacactgccctcgcacttagagatagggacggactcagattcgtggttgctccagtggcagcaacagatgggggtggccctgtccttccccttgacgctaggtatgcactcacagtcttccctcacgtcccaggaagaacaggagagttcggacaaagactcacagaggcagagagggacagactgcttgctcttctggcagaactccacggaagaacacctcctgaaacaaccccaccagccgatatggaaccaccaggacttcctggtgttagagcagcactcgccgaaagtgaaggaccttggagtggaggaccatttgcagaacccgctagacttcttctcagagaacacgaggccacactgcacgcaagactcgctgaattcgaagccctcgtcgcaagagttaagggtcgtggagcacctcttgtcgttacccacggagaaccacacccaggcaacttgatcctcggagaggaaggctatctcctcgtggactgggatacagttggactggctccagctgaaagggatttgagtctcatctcagacgacccagctgacctcgcaagatacgcagagcttacaggaagaactccagacccagacgcactcgcactctatagactgcgttggagtctccttgatgtggctgagttcgtcgagtggttcagggctgaacaccaaagaacccaagacaccgagagtgcatggaaggggttcactgacacacttgggcaattggctgctggtggatcagctgcatagcaaacttatctctgttatgaatcagaagaagttcatgtctcgtttcatttaaaactttggtggtttgtgttttggggccttgtaaagcccctgatgaataattgttcaactatgtttccgttcctgtgttatacctttctttctaatgagtaatgacatcaaacttcttctgtattgaaattatgtccttgtgagtctctttatcatcgtttcgtctttacattatatgtgctacttttgtctaatgagcctgaaaagtggctccaatggtacgcactggaagatttgttggcttctggtagatatagcgacagtgttgagcttgtaatatcatgtctcttattgctaaattagttcctttcttaacagaaaccttcaaagtttttgtttttgttttcatttacctaatgtacacatacgctggccatgactaacaacatgtccaggcttagagcatatttttttctagcttaaattgttaacttgtcattcagtaaaatccgagaattgtgaagctctaattgaagctaattcgttttataaagtcagttaaaaagtatactaaattatccaacttttcttcaaaatctcaaaattctatgacaaaacgatagtctttgtttatgtcagtaccacaaagaggtggaaaaaaacaccaaaaaaacaataagcaaactatacactgagaagaaaaataaaagagagctcaatagatgttttatactaacggtagattagatcaaagatccaagctttactctacatagagcagaacccagaatcccttcatatctcttttattctagcaccgataatctactgaaaagaagacacttagagctctgtctctttgtcaaagaagtcccagccgtcatccagaagctccttacgttcattaacagaggccgcaattggatcgggtttacttattttgtgggtatctatacttttattagatttttaatcaggctcctgatttctttttatttcgattgaattcctgaacttgtattattcagtagatcgaataaattataaaaagataaaatcataaaataatattttatcctatcaatcatattaaagcaatgaatatgtaaaattaatcttatctttattttaaaaaatcatataggtttagtatttttttaaaaataaagataggattagttttactattcactgcttattacttttaaaaaaatcataaaggtttagtatttttttaaaataaatataggaatagttttactattcactgctttaatagaaaaatagtttaaaatttaagatagttttaatcccagcatttgccacgtttgaacgtgagccgaaacgatgtcgttacattatcttaacctagctgaaacgatgtcgtcataatatcgccaaatgccaactggactacgtcgaacccacaaatcccacaaagcgcgtgaaatcaaatcgctcaaaccacaaaaaagaacaacgcgtttgttacacgctcaatcccacgcgagtagagcacagtaaccttcaaataagcgaatggggcataatcagaaatccgaaataaacctaggggcattatcggaaatgaaaagtagctcactcaatataaaaatctaggaaccctagttttcgttatcactctgtgctccctcgctctatttctcagtctctgtgtttgcggctgaggattccgaacgagtgaccttcttcgtttctcgcaaaggtaacagcctctgctcttgtctcttcgattcgatctatgcctgtctcttatttacgatgatgtttcttcggttatgtttttttatttatgctttatgctgttgatgttcggttgtttgtttcgctttgtttttgtggttcagttttttaggattcttttggtttttgaatcgattaatcggaagagattttcgagttatttggtgtgttggaggtgaatcttttttttgaggtcatagatctgttgtatttgtgttataaacatgcgactttgtatgattttttacgaggttatgatgttctggttgttttattatgaatctgttgagacagaaccatgatttttgttgatgttcgtttacactattaaaggtttgttttaacaggattaaaagttttttaagcatgttgaaggagtcttgtagatatgtaaccgtcgatagtttttttgtgggtttgttcacatgttatcaagcttaatcttttactatgtatgcgaccatatctggatccagcaaaggcgattttttaattccttgtgaaacttttgtaatatgaagttgaaattttgttattggtaaactataaatgtgtgaagttggagtatacctttaccttcttatttggctttgtgatagtttaatttatatgtattttgagttctgacttgtatttctttgaattgattctagtttaagtaatcatggcctcctccgagaacgtcatcaccgagttcatgcgcttcaaggtgcgcatggagggcaccgtgaacggccacgagttcgagatcgagggcgagggcgagggccgcccctacgagggccacaacaccgtgaagctgaaggtgacgaagggcggccccctgcccttcgcctgggacatcctgtccccccagttccagtacggctccaaggtgtacgtgaagcaccccgccgacatccccgactacaagaagctgtccttccccgagggcttcaagtgggagcgcgtgatgaacttcgaggacggcggcgtggcgaccgtgacccaggactcctccctgcaggacggctgcttcatctacaaggtgaagttcatcggcgtgaacttcccctccgacggccccgtgatgcagaagaagaccatgggctgggaggcctccaccgagcgcctgtacccccgcgacggcgtgctgaagggcgagacccacaaggccctgaagctgaaggacggcggccactacctggtggagttcaagtccatctacatggccaagaagcccgtgcagctgcccggctactactacgtggacgccaagctggacatcacctcccacaacgaggactacaccatcgtggagcagtacgagcgcaccgagggccgccaccacctgttcctgtagttttgtgatctgatgataagtggttggttcgtgtctcatgcacttgggaggtgatctatttcacctggtgtagtttgtgtttccgtcagttggaaaaacttatccctatcgatttcgttttcattttctgcttttcttttatgtaccttcgtttgggcttgtaacgggcctttgtatttcaactctcaataataatccaagtgcatgttaaacaatttgtcatctgtttcggctttgatatactactggtgaagatgggccgtactactgcatcacaacgaaaaataataataagatgaaaaacttgaagtggaaaaaaaaaaaaacttgaatgttcactactactcattgaccataatgtttaacatacatagctcaatagtatttttgtgaatatggcaacacaaacagtccaaaacaattgtctcttactataccaaaccaagggcgccgcttgtttgccactctttgtgtgcaatagtgtgattaccacatctccacattcaatatattccctgaattatctgacgattttgatggctcactgttttcccaagtcttgaattgtcttctgtgcgccagtcaaatgcatatgtgttgagtttatcttttaaatatcaagcttttgtttttaacttttgtttgtaaccaaaaactcacagtaggagtttgatcacataattttatgtttgcctttgcaatttctagtgagtctttgattaaaagcttgaaaagaaaatgcagccaagcttaccaagtaagttatgtgtattaaccagaggaagagagaatcttgcaaaatttcaacaaacacaaaaagaagtattactacgattggtggagaaagaaaacgattccaaatcttgaactgttgttgtaaaagcatagcagaaagtgggagacaaccgaaatagaaatgactataacttaatttaatgttatcattataatttcttctagcaaatatttagaaagtaaatatcacatcaacctttaatgtaattaagctttctctttttgattcatgtgagatgaaaagaaaaaaaagaagagaaaagtgtagaaaacacatcatttctaagctgaagctgaggtacaaattaattaataagtgactagggtcacgtgaccctagtcacttatgattccgatgacttcgtaggttcctagctcaagccgctcgtgtccaagcgtcacttacgattagctaatgattacggcatctaggaccgactagttcttatgtgcttctagtctccaaatgtggttgatagttattttgctctaagatcaacagtaatgaagtataaatcatcgttgtggtgtgctactcggttaattgagcattaacacacacaaacatgacgaggatggtataatctccaaaaatgtgtactttgttaggtgggaccctatagccttgattaatgtgctatgttaggcatgcctggaaacgtgtgacgcatatgttttgtgaacctgttgatattatatgtgcttttatattaccatattttattaaaatactaatatttattactagtaagatataacattctatctagcttaaaaactaaccataaatattccataataactagatttaccaaactaatatactaaatatacataataaatacaaaattaacaagacaataatcaatatttatgagcttaatatatttagacattatggttggtcgacgataatcatgctaacttttcgtaattgcttgattgaaatatgcttagaataatgcctctttgttctacatggcaaatagggaccattatggtgtaacaccctgggaaccacaaacaccccgaaatgctactaaactacacaactaaccttcatatataaaatttcgacagcatctcctttgaaaatttgcatagacgtggaagcaacagagtataaacagatctagctagctaagtttaaacggccggccaaacgtgcaagcgctactagacaattcagtacattaaaaacgtccgcaatgtgttattaagttgtctaagcgtcaatttatttacaattgaatatatcctgcca

SEQ ID NO: 156 - DNA, 15433 bp, Artificial Sequence
  RV026534 T-DNA
caaacaaacatacacagcgatttattcacacgaacccgaattacaacggtatatatcctgtcagccaacaccaaaacatcaaaaaaatcgggatcaggatcaggatctgcggccgcatcctgcaggtttaaacggccggccttcactagctagctgctaagctcaaacgagcaggaagcaacgagagggtggcgcgcgaccgacgtgcgtacgtagcatgagcctgagtggagacgttggacgtgtatgtatatacctctctgcgtgttaactatgtacgtaagcggcaggcagtgcaataagtgtggctctgtagtatgtacgtgcgggtacgatgctgtaagctactgaggcaagtccataaataaataatgacacgtgcgtgttctataatctcttcgcttcttcatttgtccccttgcggagtttggcatccattgatgccgttacgctgagaacagacacagcagacgaaccaaaagtgagttcttgtatgaaactatgacccttcatcgctaggctcaaacagcaccccgtacgaacacagcaaattagtcatctaactattagcccctacatgtttcagacgatacataaatatagcccatccttagcaattagctattggccctgcccatcccaagcaatgatctcgaagtatttttaatatatagtatttttaatatgtagcttttaaaattagaagataattttgagacaaaaatctccaagtatttttttgggtattttttactgcctccgtttttctttatttctcgtcacctagtttaattttgtgctaatcggctataaacgaaacagagagaaaagttactctaaaagcaactccaacagattagatataaatcttatatcctgcctagagctgttaaaaagatagacaactttagtggattagtgtatgcaacaaactctccaaatttaagtatcccaactacccaacgcatatcgttcccttttcattggcgcacgaactttcacctgctatagccgacgtacatgttcgttttttttgggcggcgcttactttcttccccgttcgttctcagcatcgcaactcaatttgttatggcggagaagcccttgtatcccaggtagtaatgcacagatatgcattattattattcataaaatcgagctagttaccctatgaggtgacatgaagcgctcacggttactatgacggttagcttcacgactgttggtggcagtagcgtacgacttagctatagttccggacttacctaactgactagagtcacacttagctgaccctagtcacttaggcgcgccaagcttggatctcctgcaggatctggccggccggatgggcggatctcgtacctcaactttgtatagaaaagttgggccagaatggcccggaccgggttaccaagcggccgcgaattccagaagaccaaagggcaattgagacttttcaacaaagggtaatatcgggaaacctcctcggattccattgcccagctatctgtcacttcatcaaaaggacagtagaaaaggaaggtggcacctacaaatgccatcattgcgataaaggaaaggctatcgttcaagatgcctctgccgacagtggtcccaaagatggacccccacccacgaggagcatcgtggaaaaagaagacgttccaaccacgtcttcaaagcaagtggattgatgtgatatctccactgacgtaagggatgacgcacaatcccactatccttcgcaagacccttcctctatataaggaagttcatttcatttggagaggacccatggaaacagcacagcaccagcagaacaaccaacagcactacctccaccaacacctctccatcggacaaggaacaaacatcgaggacggcagtaacaagaacaactcctccaacttcatgtgcaggcaaaatagtacccgctggacaccaaccactgaccagatcaggatattaaaggacctctactacaacaacggagtcagatcacctaccgctgaacagatccagagaatctccgccaagctcaggcagtacggcaagatcgagggcaagaacgtcttctactggttccagaaccataaagcccgcgagagacaaaagaagcgcctcatcgccgcagccaccaccgataacactaacctcccaatgcagatgcagttccagagaggagtctggagatcctctgcagacgaccccatccaccacaagtatactaatccaggagtgcactgcccttcagcttcttcccacggagttctcgcagtcggacagaacggcaatcacggatacggagccttggcaatggaaaaatccttccgcgactgctccatcagtccaggcagttccatgtcacaccaccaccaccaaaacttcgcttgggcaggagtcgatccttattcctcaaccacaacctaccctttcctcgagaagaccaagcacttcgagaatgaaaccctcgaagctgatgaagagcagcaagaggaggaccaggagaactactactaccaaaggaccacctctgccatcgaaaccctgcctctcttccctatgcacgaggagaacatctcctccttctgcaacctcaagcaccaggagtcatccggaggattctacaccgagtggtacagagcagacgacaacctcgcagcagccagagcttccctcgagctctccttgaactccttcatcggcaactcctcctagggtacctgacatcttatagtctgcaacctctcgtgtctgaattcctatctttatcaagtgttattgcttccacgactataggacagctttcgtcgaaaggttttgctcatgtgatctcgaaggattcatctagtctgatttttcgtgacttgtatcggttttattggattcatccaacatatatcaataaaaaatgagttgtgtttcctttcttcctagttcagttaaaattatttccctcctgcgcttgtgctgtaattgtctgtgtacctgttgtttgtgactgtgttagttcccttggatatgatttcgtatttgatatgtacatggagatagcttagcttcattattggagtatgaagttagtatgacatagtcactctcctggaaaattgacactgcaaaccatatttttattctgaaccacaaatcctagtcagtccgctggcatatgccgtccgtttgctgaatccagaacgtgggtttggagatgtacggctgagatgcctctatgcgaaggggatttcgtggtgaaacgagatgggagtagagcaacgcccgtggaagatgcttcaaacttccacacttttgagcaacgatcggcagtagtaaggtagacgatttcaagatcaaagcatatgaagataaacaacatcaacaacaaaatttgttggggttctatagagagaaacagagctacatacatacactgttttgtatctaccatctgagatgatgaaaagatgaaaaactaaagaatgccccggcgccaacgccaggacacgccgcgcgcgcgtcacccgagccatctcttgacccagccggcgctgtatatttacacacgttgcagcatcgatcaccacctgttcgatcgcgtcgccgtcaccaagcttggcgcgccggtcacccggtccgggcctagaaggccacccggggctcggcgttaggcttttagtccgctaggtggctagaccgaggttaggacgctagttcactaggggcctagtggtgttttaaggatgggcaagtttgtacaaaaaagcaggctggcgccggaaccaattcagtcgagtgcggccgccagtgtgatggatatctcgacccgggtgattgcggttacatcatgtacggaaaaataattctaatccttgatttaaatttgaacttgactatttatttattctttatttcattttgtaaatcattttatgtatctcctggcaagcaattttatccaccttgcaccaacaccttcgggttccataatcaaaccaccttaacttcacaccatgctgtaactcacaccgcccagcatctccaatgtgaaagaagctaaaatttaataaacaatcatacgaagcagtgacaaaataccagatggtattaatgcttcgataaaattaattggaaagtataaaatggtagaaaataataaattataattaatttaagtaagataaaaaataattaaaaactaaaatgttaaaattttaaaaaaattattttaaataatatttaaaaacattaaaaatcattttaaaaaatttatttatagaacaattaaataaatatttcagctaataaaaaacaaaagcttacctagccttagaagacaacttgtccaacaattagatgatacccattgcccttacgttttctttaacatcaattattgtttttgtcaacaagctatcttttagttttattttattggtaaaaaatatgtcgccttcaagttgcatcatttaacacatctcgtcattagaaaaataaaactcttccctaaacgattagtagaaaaaatcattcgataataaataagaaagaaaaattagaaaaaaataacttcattttaaaaaaatcattaaggctatattttttaaatgactaattttatatagactgtaactaaaagtatacaatttattatgctatgtatcttaaagaattacttataaaaatctacggaagaatatcttacaaagtgaaaaacaaatgagaaagaatttagtgggatgattatgattttatttgaaaattgaaaaaataattattaaagactttagtggagtaagaaagctttcctattagtcttttcttatccataaaaaaaaaaaaaaaaatctagcgtgacagcttttccatagattttaataatgtaaaatactggtagcagccgaccgttcaggtaatggacactgtggtcctaacttgcaacgggtgcgggcccaatttaataacgccgtggtaacggataaagccaagcgtgaagcggtgaaggtacatctctgactccgtcaagattacgaaaccgtcaactacgaaggactccccgaaatatcatctgtgtcataaacaccaagtcacaccatacatgggcacgcgtcacaatatgattggagaacggttccaccgcatatgctataaaatgcccccacacccctcgaccctaatcgcacttcaattgcaatcaaattagttcattctctttgcgcagttccctacctctcctttcaaggttcgtagatttcttccgtttttttttcttcttctttattgtttgttctacatcagcatgatgttgatttgattgtgttttctatcgtttcatcgattataaattttcataatcagaagattcagcttttattaatgcaagaacgtccttaattgatgattttataaccgtaaattaggtctaattagagtttttttcataaagattttcagatccgtttacaacaagccttaattgttgattctgtagtcgtagattaaggtttttttcatgaactacttcagatccgttaaacaacagccttatttgttgatacttcagtcgtttttcaagaaattgttcagatccgttgataaaagccttattcgttgattctgtatggtatttcaagagatattgctcaggtcctttagcaactaccttatttgttgattctgtggccatagattaggattttttttcacgaaattgcttcttgaaattacgtgatggattttgattctgatttatcttgtgattgttgactctacagccatggcccacagcaagcacggcctgaaggaggagatgaccatgaagtaccacatggagggctgcgtgaacggccacaagttcgtgatcaccggcgagggcatcggctaccccttcaagggcaagcagaccatcaacctgtgcgtgatcgagggcggccccctgcccttcagcgaggacatcctgagcgccggcttcaagtacggcgaccggatcttcaccgagtacccccaggacatcgtggactacttcaagaacagctgccccgccggctacacctggggccggagcttcctgttcgaggacggcgccgtgtgcatctgtaacgtggacatcaccgtgagcgtgaaggagaactgcatctaccacaagagcatcttcaacggcgtgaacttccccgccgacggccccgtgatgaagaagatgaccaccaactgggaggccagctgcgagaagatcatgcccgtgcctaagcagggcatcctgaagggcgacgtgagcatgtacctgctgctgaaggacggcggccggtaccggtgccagttcgacaccgtgtacaaggccaagagcgtgcccagcaagatgcccgagtggcacttcatccagcacaagctgctgcgggaggaccggagcgacgccaagaaccagaagtggcagctgaccgagcacgccatcgccttccccagcgccctggcctgagagctcgaatttccccgatcgttcaaacatttggcaataaagtttcttaagattgaatcctgttgccggtcttgcgatgattatcatataatttctgttgaattacgttaagcatgtaataattaacatgtaatgcatgacgttatttatgagatgggtttttatgattagagtcccgcaattatacatttaatacgcgatagaaaacaaaatatagcgcgcaaactaggataaattatcgcgcgcggtgtcatctatgttactagatcgggaattctagtggccggcccagctgatatctagacccagctttcttgtacaaagtggccgttaacggatcggccagaatggcccggaccgggttaccgaattcgagctcggtaccctgggatccgatatcgatgggccctggccgaagcttggtcacccggtccgggcctagaaggccagcttcggccgccccgggcaactttattatacaaagttgatggtacggatccgtcgacggcgcgccgcggacctgaattccagcacactggcggccgttagtctaaaaacggcccctaactaacgcttagttgcccgctagattagtcccccgttagtgcctagttagacacacgacgaactaggggctactagtaacggccgccagtgtgctcggtacggccagaatggccatctggattcagcagggggtgattgcggttacatcatgtacggaaaaataattctaatccttgatttaaatttgaacttgactatttatttattctttatttcattttgtaaatcattttatgtatctcctggcaagcaattttatccaccttgcaccaacaccttcgggttccataatcaaaccaccttaacttcacaccatgctgtaactcacaccgcccagcatctccaatgtgaaagaagctaaaatttaataaacaatcatacgaagcagtgacaaaataccagatggtattaatgcttcgataaaattaattggaaagtataaaatggtagaaaataataaattataattaatttaagtaagataaaaaataattaaaaactaaaatgttaaaattttaaaaaaattattttaaataatatttaaaaacattaaaaatcattttaaaaaatttatttatagaacaattaaataaatatttcagctaataaaaaacaaaagcttacctagccttagaagacaacttgtccaacaattagatgatacccattgcccttacgttttctttaacatcaattattgtttttgtcaacaagctatcttttagttttattttattggtaaaaaatatgtcgccttcaagttgcatcatttaacacatctcgtcattagaaaaataaaactcttccctaaacgattagtagaaaaaatcattcgataataaataagaaagaaaaattagaaaaaaataacttcattttaaaaaaatcattaaggctatattttttaaatgactaattttatatagactgtaactaaaagtatacaatttattatgctatgtatcttaaagaattacttataaaaatctacggaagaatatcttacaaagtgaaaaacaaatgagaaagaatttagtgggatgattatgattttatttgaaaattgaaaaaataattattaaagactttagtggagtaagaaagctttcctattagtcttttcttatccataaaaaaaaaaaaaaaaatctagcgtgacagcttttccatagattttaataatgtaaaatactggtagcagccgaccgttcaggtaatggacactgtggtcctaacttgcaacgggtgcgggcccaatttaataacgccgtggtaacggataaagccaagcgtgaagcggtgaaggtacatctctgactccgtcaagattacgaaaccgtcaactacgaaggactccccgaaatatcatctgtgtcataaacaccaagtcacaccatacatgggcacgcgtcacaatatgattggagaacggttccaccgcatatgctataaaatgcccccacacccctcgaccctaatcgcacttcaattgcaatcaaattagttcattctctttgcgcagttccctacctctcctttcaaggttcgtagatttcttccgtttttttttcttcttctttattgtttgttctacatcagcatgatgttgatttgattgtgttttctatcgtttcatcgattataaattttcataatcagaagattcagcttttattaatgcaagaacgtccttaattgatgattttataaccgtaaattaggtctaattagagtttttttcataaagattttcagatccgtttacaacaagccttaattgttgattctgtagtcgtagattaaggtttttttcatgaactacttcagatccgttaaacaacagccttatttgttgatacttcagtcgtttttcaagaaattgttcagatccgttgataaaagccttattcgttgattctgtatggtatttcaagagatattgctcaggtcctttagcaactaccttatttgttgattctgtggccatagattaggattttttttcacgaaattgcttcttgaaattacgtgatggattttgattctgatttatcttgtgattgttgactctacagccatggctgcaactactcttacatctgctttacctggtgctttcagttcatcccagagaccaagtgctcctttcaacttacaaagatcacctagagtgcttagaaggttcaacagaaagacaggacgtcaacctcgtggacttgttcgtgctgcaaaggctcaagcggcgcaaaacctgccagagaaattcgatgaaacaagactctgggaggccctcaggggatttggggttagtccaagtagggttacttacgctcccgtcggattcggagattaccactggaccgtcacagatgaagacgggagaccttggttcgcaactgtcagtgacctcgaacacaaagagcattgcgggcagggagcacaagcagcccttaaaggactcagacaagctatggacactgccctcgcacttagagatagggacggactcagattcgtggttgctccagtggcagcaacagatgggggtggccctgtccttccccttgacgctaggtatgcactcacagtcttccctcacgtcccaggaagaacaggagagttcggacaaagactcacagaggcagagagggacagactgcttgctcttctggcagaactccacggaagaacacctcctgaaacaaccccaccagccgatatggaaccaccaggacttcctggtgttagagcagcactcgccgaaagtgaaggaccttggagtggaggaccatttgcagaacccgctagacttcttctcagagaacacgaggccacactgcacgcaagactcgctgaattcgaagccctcgtcgcaagagttaagggtcgtggagcacctcttgtcgttacccacggagaaccacacccaggcaacttgatcctcggagaggaaggctatctcctcgtggactgggatacagttggactggctccagctgaaagggatttgagtctcatctcagacgacccagctgacctcgcaagatacgcagagcttacaggaagaactccagacccagacgcactcgcactctatagactgcgttggagtctccttgatgtggctgagttcgtcgagtggttcagggctgaacaccaaagaacccaagacaccgagagtgcatggaaggggttcactgacacacttgggcaattggctgctggtggatcagctgcatagcaaacttatctctgttatgaatcagaagaagttcatgtctcgtttcatttaaaactttggtggtttgtgttttggggccttgtaaagcccctgatgaataattgttcaactatgtttccgttcctgtgttatacctttctttctaatgagtaatgacatcaaacttcttctgtattgaaattatgtccttgtgagtctctttatcatcgtttcgtctttacattatatgtgctacttttgtctaatgagcctgaaaagtggctccaatggtacgcactggaagatttgttggcttctggtagatatagcgacagtgttgagcttgtaatatcatgtctcttattgctaaattagttcctttcttaacagaaaccttcaaagtttttgtttttgttttcatttacctaatgtacacatacgctggccatgactaacaacatgtccaggcttagagcatatttttttctagcttaaattgttaacttgtcattcagtaaaatccgagaattgtgaagctctaattgaagctaattcgttttataaagtcagttaaaaagtatactaaattatccaacttttcttcaaaatctcaaaattctatgacaaaacgatagtctttgtttatgtcagtaccacaaagaggtggaaaaaaacaccaaaaaaacaataagcaaactatacactgagaagaaaaataaaagagagctcaatagatgttttatactaacggtagattagatcaaagatccaagctttactctacatagagcagaacccagaatcccttcatatctcttttattctagcaccgataatctactgaaaagaagacacttagagctctgtctctttgtcaaagaagtcccagccgtcatccagaagctccttacgttcattaacagaggccgcaattggatcgggtttacttattttgtgggtatctatacttttattagatttttaatcaggctcctgatttctttttatttcgattgaattcctgaacttgtattattcagtagatcgaataaattataaaaagataaaatcataaaataatattttatcctatcaatcatattaaagcaatgaatatgtaaaattaatcttatctttattttaaaaaatcatataggtttagtatttttttaaaaataaagataggattagttttactattcactgcttattacttttaaaaaaatcataaaggtttagtatttttttaaaataaatataggaatagttttactattcactgctttaatagaaaaatagtttaaaatttaagatagttttaatcccagcatttgccacgtttgaacgtgagccgaaacgatgtcgttacattatcttaacctagctgaaacgatgtcgtcataatatcgccaaatgccaactggactacgtcgaacccacaaatcccacaaagcgcgtgaaatcaaatcgctcaaaccacaaaaaagaacaacgcgtttgttacacgctcaatcccacgcgagtagagcacagtaaccttcaaataagcgaatggggcataatcagaaatccgaaataaacctaggggcattatcggaaatgaaaagtagctcactcaatataaaaatctaggaaccctagttttcgttatcactctgtgctccctcgctctatttctcagtctctgtgtttgcggctgaggattccgaacgagtgaccttcttcgtttctcgcaaaggtaacagcctctgctcttgtctcttcgattcgatctatgcctgtctcttatttacgatgatgtttcttcggttatgtttttttatttatgctttatgctgttgatgttcggttgtttgtttcgctttgtttttgtggttcagttttttaggattcttttggtttttgaatcgattaatcggaagagattttcgagttatttggtgtgttggaggtgaatcttttttttgaggtcatagatctgttgtatttgtgttataaacatgcgactttgtatgattttttacgaggttatgatgttctggttgttttattatgaatctgttgagacagaaccatgatttttgttgatgttcgtttacactattaaaggtttgttttaacaggattaaaagttttttaagcatgttgaaggagtcttgtagatatgtaaccgtcgatagtttttttgtgggtttgttcacatgttatcaagcttaatcttttactatgtatgcgaccatatctggatccagcaaaggcgattttttaattccttgtgaaacttttgtaatatgaagttgaaattttgttattggtaaactataaatgtgtgaagttggagtatacctttaccttcttatttggctttgtgatagtttaatttatatgtattttgagttctgacttgtatttctttgaattgattctagtttaagtaatcatggcctcctccgagaacgtcatcaccgagttcatgcgcttcaaggtgcgcatggagggcaccgtgaacggccacgagttcgagatcgagggcgagggcgagggccgcccctacgagggccacaacaccgtgaagctgaaggtgacgaagggcggccccctgcccttcgcctgggacatcctgtccccccagttccagtacggctccaaggtgtacgtgaagcaccccgccgacatccccgactacaagaagctgtccttccccgagggcttcaagtgggagcgcgtgatgaacttcgaggacggcggcgtggcgaccgtgacccaggactcctccctgcaggacggctgcttcatctacaaggtgaagttcatcggcgtgaacttcccctccgacggccccgtgatgcagaagaagaccatgggctgggaggcctccaccgagcgcctgtacccccgcgacggcgtgctgaagggcgagacccacaaggccctgaagctgaaggacggcggccactacctggtggagttcaagtccatctacatggccaagaagcccgtgcagctgcccggctactactacgtggacgccaagctggacatcacctcccacaacgaggactacaccatcgtggagcagtacgagcgcaccgagggccgccaccacctgttcctgtagttttgtgatctgatgataagtggttggttcgtgtctcatgcacttgggaggtgatctatttcacctggtgtagtttgtgtttccgtcagttggaaaaacttatccctatcgatttcgttttcattttctgcttttcttttatgtaccttcgtttgggcttgtaacgggcctttgtatttcaactctcaataataatccaagtgcatgttaaacaatttgtcatctgtttcggctttgatatactactggtgaagatgggccgtactactgcatcacaacgaaaaataataataagatgaaaaacttgaagtggaaaaaaaaaaaaacttgaatgttcactactactcattgaccataatgtttaacatacatagctcaatagtatttttgtgaatatggcaacacaaacagtccaaaacaattgtctcttactataccaaaccaagggcgccgcttgtttgccactctttgtgtgcaatagtgtgattaccacatctccacattcaatatattccctgaattatctgacgattttgatggctcactgttttcccaagtcttgaattgtcttctgtgcgccagtcaaatgcatatgtgttgagtttatcttttaaatatcaagcttttgtttttaacttttgtttgtaaccaaaaactcacagtaggagtttgatcacataattttatgtttgcctttgcaatttctagtgagtctttgattaaaagcttgaaaagaaaatgcagccaagcttaccaagtaagttatgtgtattaaccagaggaagagagaatcttgcaaaatttcaacaaacacaaaaagaagtattactacgattggtggagaaagaaaacgattccaaatcttgaactgttgttgtaaaagcatagcagaaagtgggagacaaccgaaatagaaatgactataacttaatttaatgttatcattataatttcttctagcaaatatttagaaagtaaatatcacatcaacctttaatgtaattaagctttctctttttgattcatgtgagatgaaaagaaaaaaaagaagagaaaagtgtagaaaacacatcatttctaagctgaagctgaggtacaaattaattaataagtgactagggtcacgtgaccctagtcacttatgattccgatgacttcgtaggttcctagctcaagccgctcgtgtccaagcgtcacttacgattagctaatgattacggcatctaggaccgactagttcttatgtgcttctagtctccaaatgtggttgatagttattttgctctaagatcaacagtaatgaagtataaatcatcgttgtggtgtgctactcggttaattgagcattaacacacacaaacatgacgaggatggtataatctccaaaaatgtgtactttgttaggtgggaccctatagccttgattaatgtgctatgttaggcatgcctggaaacgtgtgacgcatatgttttgtgaacctgttgatattatatgtgcttttatattaccatattttattaaaatactaatatttattactagtaagatataacattctatctagcttaaaaactaaccataaatattccataataactagatttaccaaactaatatactaaatatacataataaatacaaaattaacaagacaataatcaatatttatgagcttaatatatttagacattatggttggtcgacgataatcatgctaacttttcgtaattgcttgattgaaatatgcttagaataatgcctctttgttctacatggcaaatagggaccattatggtgtaacaccctgggaaccacaaacaccccgaaatgctactaaactacacaactaaccttcatatataaaatttcgacagcatctcctttgaaaatttgcatagacgtggaagcaacagagtataaacagatctagctagctaagtttaaacggccggccaaacgtgcaagcgctactagacaattcagtacattaaaaacgtccgcaatgtgttattaagttgtctaagcgtcaatttatttacaattgaatatatcctgcca

SEQ ID NO: 157 - DNA, 15458 bp, Artificial Sequence
  RV026531 T-DNA
aattacaacggtatatatcctgtcagccaacaccaaaacatcaaaaaaatcgggatcaggatcaggatctgcggccgcatcctgcaggtttaaacggccggccttcactagctagctgctaagctcaaacgagcaggaagcaacgagagggtggcgcgcgaccgacgtgcgtacgtagcatgagcctgagtggagacgttggacgtgtatgtatatacctctctgcgtgttaactatgtacgtaagcggcaggcagtgcaataagtgtggctctgtagtatgtacgtgcgggtacgatgctgtaagctactgaggcaagtccataaataaataatgacacgtgcgtgttctataatctcttcgcttcttcatttgtccccttgcggagtttggcatccattgatgccgttacgctgagaacagacacagcagacgaaccaaaagtgagttcttgtatgaaactatgacccttcatcgctaggctcaaacagcaccccgtacgaacacagcaaattagtcatctaactattagcccctacatgtttcagacgatacataaatatagcccatccttagcaattagctattggccctgcccatcccaagcaatgatctcgaagtatttttaatatatagtatttttaatatgtagcttttaaaattagaagataattttgagacaaaaatctccaagtatttttttgggtattttttactgcctccgtttttctttatttctcgtcacctagtttaattttgtgctaatcggctataaacgaaacagagagaaaagttactctaaaagcaactccaacagattagatataaatcttatatcctgcctagagctgttaaaaagatagacaactttagtggattagtgtatgcaacaaactctccaaatttaagtatcccaactacccaacgcatatcgttcccttttcattggcgcacgaactttcacctgctatagccgacgtacatgttcgttttttttgggcggcgcttactttcttccccgttcgttctcagcatcgcaactcaatttgttatggcggagaagcccttgtatcccaggtagtaatgcacagatatgcattattattattcataaaatcgagctagttaccctatgaggtgacatgaagcgctcacggttactatgacggttagcttcacgactgttggtggcagtagcgtacgacttagctatagttccggacttacctaactgactagagtcacacttagctgaccctagtcacttaggcgcgccaagcttggatctcctgcaggatctggccggccggatgggcggatctcgtacctcaactttgtatagaaaagttgggccagaatggcccggaccgggttaccaagcggccgcgaattccagaagaccaaagggcaattgagacttttcaacaaagggtaatatcgggaaacctcctcggattccattgcccagctatctgtcacttcatcaaaaggacagtagaaaaggaaggtggcacctacaaatgccatcattgcgataaaggaaaggctatcgttcaagatgcctctgccgacagtggtcccaaagatggacccccacccacgaggagcatcgtggaaaaagaagacgttccaaccacgtcttcaaagcaagtggattgatgtgatatctccactgacgtaagggatgacgcacaatcccactatccttcgcaagacccttcctctatataaggaagttcatttcatttggagaggacccatggaccctcaacagaacccaaatgaagtacaagaaggaggcaacaggcaggggggtggaatcatgtgcaggcaaagcagtacgcggtggacacccacaactgatcagataaaaatcttgaaggacctttactacaacaatggcattaggtcacccagcgctgagcagattcagaggatctctgctaagctgcgacagttcggcaagatcgaaggcaagaacgttttctattggtttcagaaccacaaagctcgtgagaggcagaagaaaagattcacttcttcttctgctcctgatcaccatcatcatgcagcaccaccagtgccagctgtaccaccagaatccaataatatcaggcaaagatcatcaggggttgggattgatattaatgcaactgctgctgctgcttatgaacaagcacccattaatcaccaccgcaagtattccaacatttctgctccaccagccgggttttcttctgcatcttcttcttcagttggtgtgaatgtttctgttggggcacagatgggaaactatgggtatggatccattgctatggagaagagctttagggagtgctcaatatcatctggaggaagtactagcactggtcatgtgggtggatctaattataatacttttaatcacaactatggatcatgggttggtgttgatccatattcctcgccctacactatctttgacaagaaatcctcatcaaaaccagtgtttggtgaccaggaaaatatgacggaagaagaatactacaatctgcaagcttcccaagagattgagactctcccactcttccccatgcacggtgaagacattcatggctttggcaacatcaagtcatcctctatggatggctactactccggctggtacaggtccgatggcggcaacgatggtggctctcgcacttcccttgagcttagcctcaattcctacggtcacatgacccatgattacttcagatcatattgaggtacctgacatcttatagtctgcaacctctcgtgtctgaattcctatctttatcaagtgttattgcttccacgactataggacagctttcgtcgaaaggttttgctcatgtgatctcgaaggattcatctagtctgatttttcgtgacttgtatcggttttattggattcatccaacatatatcaataaaaaatgagttgtgtttcctttcttcctagttcagttaaaattatttccctcctgcgcttgtgctgtaattgtctgtgtacctgttgtttgtgactgtgttagttcccttggatatgatttcgtatttgatatgtacatggagatagcttagcttcattattggagtatgaagttagtatgacatagtcactctcctggaaaattgacactgcaaaccatatttttattctgaaccacaaatcctagtcagtccgctggcatatgccgtccgtttgctgaatccagaacgtgggtttggagatgtacggctgagatgcctctatgcgaaggggatttcgtggtgaaacgagatgggagtagagcaacgcccgtggaagatgcttcaaacttccacacttttgagcaacgatcggcagtagtaaggtagacgatttcaagatcaaagcatatgaagataaacaacatcaacaacaaaatttgttggggttctatagagagaaacagagctacatacatacactgttttgtatctaccatctgagatgatgaaaagatgaaaaactaaagaatgccccggcgccaacgccaggacacgccgcgcgcgcgtcacccgagccatctcttgacccagccggcgctgtatatttacacacgttgcagcatcgatcaccacctgttcgatcgcgtcgccgtcaccaagcttggcgcgccggtcacccggtccgggcctagaaggccacccggggctcggcgttaggcttttagtccgctaggtggctagaccgaggttaggacgctagttcactaggggcctagtggtgttttaaggatgggcaagtttgtacaaaaaagcaggctggcgccggaaccaattcagtcgagtgcggccgccagtgtgatggatatctcgacccgggtgattgcggttacatcatgtacggaaaaataattctaatccttgatttaaatttgaacttgactatttatttattctttatttcattttgtaaatcattttatgtatctcctggcaagcaattttatccaccttgcaccaacaccttcgggttccataatcaaaccaccttaacttcacaccatgctgtaactcacaccgcccagcatctccaatgtgaaagaagctaaaatttaataaacaatcatacgaagcagtgacaaaataccagatggtattaatgcttcgataaaattaattggaaagtataaaatggtagaaaataataaattataattaatttaagtaagataaaaaataattaaaaactaaaatgttaaaattttaaaaaaattattttaaataatatttaaaaacattaaaaatcattttaaaaaatttatttatagaacaattaaataaatatttcagctaataaaaaacaaaagcttacctagccttagaagacaacttgtccaacaattagatgatacccattgcccttacgttttctttaacatcaattattgtttttgtcaacaagctatcttttagttttattttattggtaaaaaatatgtcgccttcaagttgcatcatttaacacatctcgtcattagaaaaataaaactcttccctaaacgattagtagaaaaaatcattcgataataaataagaaagaaaaattagaaaaaaataacttcattttaaaaaaatcattaaggctatattttttaaatgactaattttatatagactgtaactaaaagtatacaatttattatgctatgtatcttaaagaattacttataaaaatctacggaagaatatcttacaaagtgaaaaacaaatgagaaagaatttagtgggatgattatgattttatttgaaaattgaaaaaataattattaaagactttagtggagtaagaaagctttcctattagtcttttcttatccataaaaaaaaaaaaaaaaatctagcgtgacagcttttccatagattttaataatgtaaaatactggtagcagccgaccgttcaggtaatggacactgtggtcctaacttgcaacgggtgcgggcccaatttaataacgccgtggtaacggataaagccaagcgtgaagcggtgaaggtacatctctgactccgtcaagattacgaaaccgtcaactacgaaggactccccgaaatatcatctgtgtcataaacaccaagtcacaccatacatgggcacgcgtcacaatatgattggagaacggttccaccgcatatgctataaaatgcccccacacccctcgaccctaatcgcacttcaattgcaatcaaattagttcattctctttgcgcagttccctacctctcctttcaaggttcgtagatttcttccgtttttttttcttcttctttattgtttgttctacatcagcatgatgttgatttgattgtgttttctatcgtttcatcgattataaattttcataatcagaagattcagcttttattaatgcaagaacgtccttaattgatgattttataaccgtaaattaggtctaattagagtttttttcataaagattttcagatccgtttacaacaagccttaattgttgattctgtagtcgtagattaaggtttttttcatgaactacttcagatccgttaaacaacagccttatttgttgatacttcagtcgtttttcaagaaattgttcagatccgttgataaaagccttattcgttgattctgtatggtatttcaagagatattgctcaggtcctttagcaactaccttatttgttgattctgtggccatagattaggattttttttcacgaaattgcttcttgaaattacgtgatggattttgattctgatttatcttgtgattgttgactctacagccatggcccacagcaagcacggcctgaaggaggagatgaccatgaagtaccacatggagggctgcgtgaacggccacaagttcgtgatcaccggcgagggcatcggctaccccttcaagggcaagcagaccatcaacctgtgcgtgatcgagggcggccccctgcccttcagcgaggacatcctgagcgccggcttcaagtacggcgaccggatcttcaccgagtacccccaggacatcgtggactacttcaagaacagctgccccgccggctacacctggggccggagcttcctgttcgaggacggcgccgtgtgcatctgtaacgtggacatcaccgtgagcgtgaaggagaactgcatctaccacaagagcatcttcaacggcgtgaacttccccgccgacggccccgtgatgaagaagatgaccaccaactgggaggccagctgcgagaagatcatgcccgtgcctaagcagggcatcctgaagggcgacgtgagcatgtacctgctgctgaaggacggcggccggtaccggtgccagttcgacaccgtgtacaaggccaagagcgtgcccagcaagatgcccgagtggcacttcatccagcacaagctgctgcgggaggaccggagcgacgccaagaaccagaagtggcagctgaccgagcacgccatcgccttccccagcgccctggcctgagagctcgaatttccccgatcgttcaaacatttggcaataaagtttcttaagattgaatcctgttgccggtcttgcgatgattatcatataatttctgttgaattacgttaagcatgtaataattaacatgtaatgcatgacgttatttatgagatgggtttttatgattagagtcccgcaattatacatttaatacgcgatagaaaacaaaatatagcgcgcaaactaggataaattatcgcgcgcggtgtcatctatgttactagatcgggaattctagtggccggcccagctgatatctagacccagctttcttgtacaaagtggccgttaacggatcggccagaatggcccggaccgggttaccgaattcgagctcggtaccctgggatccgatatcgatgggccctggccgaagcttggtcacccggtccgggcctagaaggccagcttcggccgccccgggcaactttattatacaaagttgatggtacggatccgtcgacggcgcgccgcggacctgaattccagcacactggcggccgttagtctaaaaacggcccctaactaacgcttagttgcccgctagattagtcccccgttagtgcctagttagacacacgacgaactaggggctactagtaacggccgccagtgtgctcggtacggccagaatggccatctggattcagcagggggtgattgcggttacatcatgtacggaaaaataattctaatccttgatttaaatttgaacttgactatttatttattctttatttcattttgtaaatcattttatgtatctcctggcaagcaattttatccaccttgcaccaacaccttcgggttccataatcaaaccaccttaacttcacaccatgctgtaactcacaccgcccagcatctccaatgtgaaagaagctaaaatttaataaacaatcatacgaagcagtgacaaaataccagatggtattaatgcttcgataaaattaattggaaagtataaaatggtagaaaataataaattataattaatttaagtaagataaaaaataattaaaaactaaaatgttaaaattttaaaaaaattattttaaataatatttaaaaacattaaaaatcattttaaaaaatttatttatagaacaattaaataaatatttcagctaataaaaaacaaaagcttacctagccttagaagacaacttgtccaacaattagatgatacccattgcccttacgttttctttaacatcaattattgtttttgtcaacaagctatcttttagttttattttattggtaaaaaatatgtcgccttcaagttgcatcatttaacacatctcgtcattagaaaaataaaactcttccctaaacgattagtagaaaaaatcattcgataataaataagaaagaaaaattagaaaaaaataacttcattttaaaaaaatcattaaggctatattttttaaatgactaattttatatagactgtaactaaaagtatacaatttattatgctatgtatcttaaagaattacttataaaaatctacggaagaatatcttacaaagtgaaaaacaaatgagaaagaatttagtgggatgattatgattttatttgaaaattgaaaaaataattattaaagactttagtggagtaagaaagctttcctattagtcttttcttatccataaaaaaaaaaaaaaaaatctagcgtgacagcttttccatagattttaataatgtaaaatactggtagcagccgaccgttcaggtaatggacactgtggtcctaacttgcaacgggtgcgggcccaatttaataacgccgtggtaacggataaagccaagcgtgaagcggtgaaggtacatctctgactccgtcaagattacgaaaccgtcaactacgaaggactccccgaaatatcatctgtgtcataaacaccaagtcacaccatacatgggcacgcgtcacaatatgattggagaacggttccaccgcatatgctataaaatgcccccacacccctcgaccctaatcgcacttcaattgcaatcaaattagttcattctctttgcgcagttccctacctctcctttcaaggttcgtagatttcttccgtttttttttcttcttctttattgtttgttctacatcagcatgatgttgatttgattgtgttttctatcgtttcatcgattataaattttcataatcagaagattcagcttttattaatgcaagaacgtccttaattgatgattttataaccgtaaattaggtctaattagagtttttttcataaagattttcagatccgtttacaacaagccttaattgttgattctgtagtcgtagattaaggtttttttcatgaactacttcagatccgttaaacaacagccttatttgttgatacttcagtcgtttttcaagaaattgttcagatccgttgataaaagccttattcgttgattctgtatggtatttcaagagatattgctcaggtcctttagcaactaccttatttgttgattctgtggccatagattaggattttttttcacgaaattgcttcttgaaattacgtgatggattttgattctgatttatcttgtgattgttgactctacagccatggctgcaactactcttacatctgctttacctggtgctttcagttcatcccagagaccaagtgctcctttcaacttacaaagatcacctagagtgcttagaaggttcaacagaaagacaggacgtcaacctcgtggacttgttcgtgctgcaaaggctcaagcggcgcaaaacctgccagagaaattcgatgaaacaagactctgggaggccctcaggggatttggggttagtccaagtagggttacttacgctcccgtcggattcggagattaccactggaccgtcacagatgaagacgggagaccttggttcgcaactgtcagtgacctcgaacacaaagagcattgcgggcagggagcacaagcagcccttaaaggactcagacaagctatggacactgccctcgcacttagagatagggacggactcagattcgtggttgctccagtggcagcaacagatgggggtggccctgtccttccccttgacgctaggtatgcactcacagtcttccctcacgtcccaggaagaacaggagagttcggacaaagactcacagaggcagagagggacagactgcttgctcttctggcagaactccacggaagaacacctcctgaaacaaccccaccagccgatatggaaccaccaggacttcctggtgttagagcagcactcgccgaaagtgaaggaccttggagtggaggaccatttgcagaacccgctagacttcttctcagagaacacgaggccacactgcacgcaagactcgctgaattcgaagccctcgtcgcaagagttaagggtcgtggagcacctcttgtcgttacccacggagaaccacacccaggcaacttgatcctcggagaggaaggctatctcctcgtggactgggatacagttggactggctccagctgaaagggatttgagtctcatctcagacgacccagctgacctcgcaagatacgcagagcttacaggaagaactccagacccagacgcactcgcactctatagactgcgttggagtctccttgatgtggctgagttcgtcgagtggttcagggctgaacaccaaagaacccaagacaccgagagtgcatggaaggggttcactgacacacttgggcaattggctgctggtggatcagctgcatagcaaacttatctctgttatgaatcagaagaagttcatgtctcgtttcatttaaaactttggtggtttgtgttttggggccttgtaaagcccctgatgaataattgttcaactatgtttccgttcctgtgttatacctttctttctaatgagtaatgacatcaaacttcttctgtattgaaattatgtccttgtgagtctctttatcatcgtttcgtctttacattatatgtgctacttttgtctaatgagcctgaaaagtggctccaatggtacgcactggaagatttgttggcttctggtagatatagcgacagtgttgagcttgtaatatcatgtctcttattgctaaattagttcctttcttaacagaaaccttcaaagtttttgtttttgttttcatttacctaatgtacacatacgctggccatgactaacaacatgtccaggcttagagcatatttttttctagcttaaattgttaacttgtcattcagtaaaatccgagaattgtgaagctctaattgaagctaattcgttttataaagtcagttaaaaagtatactaaattatccaacttttcttcaaaatctcaaaattctatgacaaaacgatagtctttgtttatgtcagtaccacaaagaggtggaaaaaaacaccaaaaaaacaataagcaaactatacactgagaagaaaaataaaagagagctcaatagatgttttatactaacggtagattagatcaaagatccaagctttactctacatagagcagaacccagaatcccttcatatctcttttattctagcaccgataatctactgaaaagaagacacttagagctctgtctctttgtcaaagaagtcccagccgtcatccagaagctccttacgttcattaacagaggccgcaattggatcgggtttacttattttgtgggtatctatacttttattagatttttaatcaggctcctgatttctttttatttcgattgaattcctgaacttgtattattcagtagatcgaataaattataaaaagataaaatcataaaataatattttatcctatcaatcatattaaagcaatgaatatgtaaaattaatcttatctttattttaaaaaatcatataggtttagtatttttttaaaaataaagataggattagttttactattcactgcttattacttttaaaaaaatcataaaggtttagtatttttttaaaataaatataggaatagttttactattcactgctttaatagaaaaatagtttaaaatttaagatagttttaatcccagcatttgccacgtttgaacgtgagccgaaacgatgtcgttacattatcttaacctagctgaaacgatgtcgtcataatatcgccaaatgccaactggactacgtcgaacccacaaatcccacaaagcgcgtgaaatcaaatcgctcaaaccacaaaaaagaacaacgcgtttgttacacgctcaatcccacgcgagtagagcacagtaaccttcaaataagcgaatggggcataatcagaaatccgaaataaacctaggggcattatcggaaatgaaaagtagctcactcaatataaaaatctaggaaccctagttttcgttatcactctgtgctccctcgctctatttctcagtctctgtgtttgcggctgaggattccgaacgagtgaccttcttcgtttctcgcaaaggtaacagcctctgctcttgtctcttcgattcgatctatgcctgtctcttatttacgatgatgtttcttcggttatgtttttttatttatgctttatgctgttgatgttcggttgtttgtttcgctttgtttttgtggttcagttttttaggattcttttggtttttgaatcgattaatcggaagagattttcgagttatttggtgtgttggaggtgaatcttttttttgaggtcatagatctgttgtatttgtgttataaacatgcgactttgtatgattttttacgaggttatgatgttctggttgttttattatgaatctgttgagacagaaccatgatttttgttgatgttcgtttacactattaaaggtttgttttaacaggattaaaagttttttaagcatgttgaaggagtcttgtagatatgtaaccgtcgatagtttttttgtgggtttgttcacatgttatcaagcttaatcttttactatgtatgcgaccatatctggatccagcaaaggcgattttttaattccttgtgaaacttttgtaatatgaagttgaaattttgttattggtaaactataaatgtgtgaagttggagtatacctttaccttcttatttggctttgtgatagtttaatttatatgtattttgagttctgacttgtatttctttgaattgattctagtttaagtaatcatggcctcctccgagaacgtcatcaccgagttcatgcgcttcaaggtgcgcatggagggcaccgtgaacggccacgagttcgagatcgagggcgagggcgagggccgcccctacgagggccacaacaccgtgaagctgaaggtgacgaagggcggccccctgcccttcgcctgggacatcctgtccccccagttccagtacggctccaaggtgtacgtgaagcaccccgccgacatccccgactacaagaagctgtccttccccgagggcttcaagtgggagcgcgtgatgaacttcgaggacggcggcgtggcgaccgtgacccaggactcctccctgcaggacggctgcttcatctacaaggtgaagttcatcggcgtgaacttcccctccgacggccccgtgatgcagaagaagaccatgggctgggaggcctccaccgagcgcctgtacccccgcgacggcgtgctgaagggcgagacccacaaggccctgaagctgaaggacggcggccactacctggtggagttcaagtccatctacatggccaagaagcccgtgcagctgcccggctactactacgtggacgccaagctggacatcacctcccacaacgaggactacaccatcgtggagcagtacgagcgcaccgagggccgccaccacctgttcctgtagttttgtgatctgatgataagtggttggttcgtgtctcatgcacttgggaggtgatctatttcacctggtgtagtttgtgtttccgtcagttggaaaaacttatccctatcgatttcgttttcattttctgcttttcttttatgtaccttcgtttgggcttgtaacgggcctttgtatttcaactctcaataataatccaagtgcatgttaaacaatttgtcatctgtttcggctttgatatactactggtgaagatgggccgtactactgcatcacaacgaaaaataataataagatgaaaaacttgaagtggaaaaaaaaaaaaacttgaatgttcactactactcattgaccataatgtttaacatacatagctcaatagtatttttgtgaatatggcaacacaaacagtccaaaacaattgtctcttactataccaaaccaagggcgccgcttgtttgccactctttgtgtgcaatagtgtgattaccacatctccacattcaatatattccctgaattatctgacgattttgatggctcactgttttcccaagtcttgaattgtcttctgtgcgccagtcaaatgcatatgtgttgagtttatcttttaaatatcaagcttttgtttttaacttttgtttgtaaccaaaaactcacagtaggagtttgatcacataattttatgtttgcctttgcaatttctagtgagtctttgattaaaagcttgaaaagaaaatgcagccaagcttaccaagtaagttatgtgtattaaccagaggaagagagaatcttgcaaaatttcaacaaacacaaaaagaagtattactacgattggtggagaaagaaaacgattccaaatcttgaactgttgttgtaaaagcatagcagaaagtgggagacaaccgaaatagaaatgactataacttaatttaatgttatcattataatttcttctagcaaatatttagaaagtaaatatcacatcaacctttaatgtaattaagctttctctttttgattcatgtgagatgaaaagaaaaaaaagaagagaaaagtgtagaaaacacatcatttctaagctgaagctgaggtacaaattaattaataagtgactagggtcacgtgaccctagtcacttatgattccgatgacttcgtaggttcctagctcaagccgctcgtgtccaagcgtcacttacgattagctaatgattacggcatctaggaccgactagttcttatgtgcttctagtctccaaatgtggttgatagttattttgctctaagatcaacagtaatgaagtataaatcatcgttgtggtgtgctactcggttaattgagcattaacacacacaaacatgacgaggatggtataatctccaaaaatgtgtactttgttaggtgggaccctatagccttgattaatgtgctatgttaggcatgcctggaaacgtgtgacgcatatgttttgtgaacctgttgatattatatgtgcttttatattaccatattttattaaaatactaatatttattactagtaagatataacattctatctagcttaaaaactaaccataaatattccataataactagatttaccaaactaatatactaaatatacataataaatacaaaattaacaagacaataatcaatatttatgagcttaatatatttagacattatggttggtcgacgataatcatgctaacttttcgtaattgcttgattgaaatatgcttagaataatgcctctttgttctacatggcaaatagggaccattatggtgtaacaccctgggaaccacaaacaccccgaaatgctactaaactacacaactaaccttcatatataaaatttcgacagcatctcctttgaaaatttgcatagacgtggaagcaacagagtataaacagatctagctagctaagtttaaacggccggccaaacgtgcaagcgctactagacaattcagtacattaaaaacgtccgcaatgtgttattaagttgtctaagcgtcaatttatttacaattgaatatatcctgcca

SEQ ID NO: 158 - DNA, 15376 bp, Artificial Sequence
  RV026524 T-DNA
caaacaaacatacacagcgatttattcacacgaacccgaattacaacggtatatatcctgtcagccaacaccaaaacatcaaaaaaatcgggatcaggatcaggatctgcggccgcatcctgcaggtttaaacggccggccttcactagctagctgctaagctcaaacgagcaggaagcaacgagagggtggcgcgcgaccgacgtgcgtacgtagcatgagcctgagtggagacgttggacgtgtatgtatatacctctctgcgtgttaactatgtacgtaagcggcaggcagtgcaataagtgtggctctgtagtatgtacgtgcgggtacgatgctgtaagctactgaggcaagtccataaataaataatgacacgtgcgtgttctataatctcttcgcttcttcatttgtccccttgcggagtttggcatccattgatgccgttacgctgagaacagacacagcagacgaaccaaaagtgagttcttgtatgaaactatgacccttcatcgctaggctcaaacagcaccccgtacgaacacagcaaattagtcatctaactattagcccctacatgtttcagacgatacataaatatagcccatccttagcaattagctattggccctgcccatcccaagcaatgatctcgaagtatttttaatatatagtatttttaatatgtagcttttaaaattagaagataattttgagacaaaaatctccaagtatttttttgggtattttttactgcctccgtttttctttatttctcgtcacctagtttaattttgtgctaatcggctataaacgaaacagagagaaaagttactctaaaagcaactccaacagattagatataaatcttatatcctgcctagagctgttaaaaagatagacaactttagtggattagtgtatgcaacaaactctccaaatttaagtatcccaactacccaacgcatatcgttcccttttcattggcgcacgaactttcacctgctatagccgacgtacatgttcgttttttttgggcggcgcttactttcttccccgttcgttctcagcatcgcaactcaatttgttatggcggagaagcccttgtatcccaggtagtaatgcacagatatgcattattattattcataaaatcgagctagttaccctatgaggtgacatgaagcgctcacggttactatgacggttagcttcacgactgttggtggcagtagcgtacgacttagctatagttccggacttacctaactgactagagtcacacttagctgaccctagtcacttaggcgcgccaagcttggatctcctgcaggatctggccggccggatgggcggatctcgtacctcaactttgtatagaaaagttgggccagaatggcccggaccgggttaccaagcggccgcgaattccagaagaccaaagggcaattgagacttttcaacaaagggtaatatcgggaaacctcctcggattccattgcccagctatctgtcacttcatcaaaaggacagtagaaaaggaaggtggcacctacaaatgccatcattgcgataaaggaaaggctatcgttcaagatgcctctgccgacagtggtcccaaagatggacccccacccacgaggagcatcgtggaaaaagaagacgttccaaccacgtcttcaaagcaagtggattgatgtgatatctccactgacgtaagggatgacgcacaatcccactatccttcgcaagacccttcctctatataaggaagttcatttcatttggagaggacccatggaacctcaacaacaacagcagcagcagcaaaaccaacaacaaccaaacgatgacaatagcagcggtgccaaaggaaactttctttgcaggcaaagcagtactaggtggactcccacaactgaccaaataagaatattgaaggacctttactacaacagtggagttaggtccccaagtgcagagcagattcagaggatatctgctaggcttagacagtacggtaagattgaaggcaagaatgtcttttattggtttcagaaccataaagctcgtgagaggcagaagaaaaggttcaccactgatgtccccatgcaacaaagaactgtttcgaatgcttctagttggaagcctgaagactattccttccacaacaaataccccaacattgctcctgggttttcttctgcatctccatcctcagctgctgggcttcctgttggacagatgggaaactatgggtatggatctgtaactatggagaagagttttagggactgctcaatatcagctactgccaacggtggtgttggtggatccatgagccccaactgtgggtgggttggcattgatccctactgttcatcctactctctctttgacaagcaaaaatcaactaatgaaaccctagaagatgaagaacaagatcaagatcaagaagaggaagcaactccagggattgaaaccctccctctcttccctacccagagagaagacatcaatggcttctgcaacatgaagcaccaccccatctgctactccgaaaactactgctatggctctgacgatggaaacaacgcttcgcgtacttccctcgaacttagcctcaactcttacagcaatgggcaggcacgggattccatctaaggtacctgacatcttatagtctgcaacctctcgtgtctgaattcctatctttatcaagtgttattgcttccacgactataggacagctttcgtcgaaaggttttgctcatgtgatctcgaaggattcatctagtctgatttttcgtgacttgtatcggttttattggattcatccaacatatatcaataaaaaatgagttgtgtttcctttcttcctagttcagttaaaattatttccctcctgcgcttgtgctgtaattgtctgtgtacctgttgtttgtgactgtgttagttcccttggatatgatttcgtatttgatatgtacatggagatagcttagcttcattattggagtatgaagttagtatgacatagtcactctcctggaaaattgacactgcaaaccatatttttattctgaaccacaaatcctagtcagtccgctggcatatgccgtccgtttgctgaatccagaacgtgggtttggagatgtacggctgagatgcctctatgcgaaggggatttcgtggtgaaacgagatgggagtagagcaacgcccgtggaagatgcttcaaacttccacacttttgagcaacgatcggcagtagtaaggtagacgatttcaagatcaaagcatatgaagataaacaacatcaacaacaaaatttgttggggttctatagagagaaacagagctacatacatacactgttttgtatctaccatctgagatgatgaaaagatgaaaaactaaagaatgccccggcgccaacgccaggacacgccgcgcgcgcgtcacccgagccatctcttgacccagccggcgctgtatatttacacacgttgcagcatcgatcaccacctgttcgatcgcgtcgccgtcaccaagcttggcgcgccggtcacccggtccgggcctagaaggccacccggggctcggcgttaggcttttagtccgctaggtggctagaccgaggttaggacgctagttcactaggggcctagtggtgttttaaggatgggcaagtttgtacaaaaaagcaggctggcgccggaaccaattcagtcgagtgcggccgccagtgtgatggatatctcgacccgggtgattgcggttacatcatgtacggaaaaataattctaatccttgatttaaatttgaacttgactatttatttattctttatttcattttgtaaatcattttatgtatctcctggcaagcaattttatccaccttgcaccaacaccttcgggttccataatcaaaccaccttaacttcacaccatgctgtaactcacaccgcccagcatctccaatgtgaaagaagctaaaatttaataaacaatcatacgaagcagtgacaaaataccagatggtattaatgcttcgataaaattaattggaaagtataaaatggtagaaaataataaattataattaatttaagtaagataaaaaataattaaaaactaaaatgttaaaattttaaaaaaattattttaaataatatttaaaaacattaaaaatcattttaaaaaatttatttatagaacaattaaataaatatttcagctaataaaaaacaaaagcttacctagccttagaagacaacttgtccaacaattagatgatacccattgcccttacgttttctttaacatcaattattgtttttgtcaacaagctatcttttagttttattttattggtaaaaaatatgtcgccttcaagttgcatcatttaacacatctcgtcattagaaaaataaaactcttccctaaacgattagtagaaaaaatcattcgataataaataagaaagaaaaattagaaaaaaataacttcattttaaaaaaatcattaaggctatattttttaaatgactaattttatatagactgtaactaaaagtatacaatttattatgctatgtatcttaaagaattacttataaaaatctacggaagaatatcttacaaagtgaaaaacaaatgagaaagaatttagtgggatgattatgattttatttgaaaattgaaaaaataattattaaagactttagtggagtaagaaagctttcctattagtcttttcttatccataaaaaaaaaaaaaaaaatctagcgtgacagcttttccatagattttaataatgtaaaatactggtagcagccgaccgttcaggtaatggacactgtggtcctaacttgcaacgggtgcgggcccaatttaataacgccgtggtaacggataaagccaagcgtgaagcggtgaaggtacatctctgactccgtcaagattacgaaaccgtcaactacgaaggactccccgaaatatcatctgtgtcataaacaccaagtcacaccatacatgggcacgcgtcacaatatgattggagaacggttccaccgcatatgctataaaatgcccccacacccctcgaccctaatcgcacttcaattgcaatcaaattagttcattctctttgcgcagttccctacctctcctttcaaggttcgtagatttcttccgtttttttttcttcttctttattgtttgttctacatcagcatgatgttgatttgattgtgttttctatcgtttcatcgattataaattttcataatcagaagattcagcttttattaatgcaagaacgtccttaattgatgattttataaccgtaaattaggtctaattagagtttttttcataaagattttcagatccgtttacaacaagccttaattgttgattctgtagtcgtagattaaggtttttttcatgaactacttcagatccgttaaacaacagccttatttgttgatacttcagtcgtttttcaagaaattgttcagatccgttgataaaagccttattcgttgattctgtatggtatttcaagagatattgctcaggtcctttagcaactaccttatttgttgattctgtggccatagattaggattttttttcacgaaattgcttcttgaaattacgtgatggattttgattctgatttatcttgtgattgttgactctacagccatggcccacagcaagcacggcctgaaggaggagatgaccatgaagtaccacatggagggctgcgtgaacggccacaagttcgtgatcaccggcgagggcatcggctaccccttcaagggcaagcagaccatcaacctgtgcgtgatcgagggcggccccctgcccttcagcgaggacatcctgagcgccggcttcaagtacggcgaccggatcttcaccgagtacccccaggacatcgtggactacttcaagaacagctgccccgccggctacacctggggccggagcttcctgttcgaggacggcgccgtgtgcatctgtaacgtggacatcaccgtgagcgtgaaggagaactgcatctaccacaagagcatcttcaacggcgtgaacttccccgccgacggccccgtgatgaagaagatgaccaccaactgggaggccagctgcgagaagatcatgcccgtgcctaagcagggcatcctgaagggcgacgtgagcatgtacctgctgctgaaggacggcggccggtaccggtgccagttcgacaccgtgtacaaggccaagagcgtgcccagcaagatgcccgagtggcacttcatccagcacaagctgctgcgggaggaccggagcgacgccaagaaccagaagtggcagctgaccgagcacgccatcgccttccccagcgccctggcctgagagctcgaatttccccgatcgttcaaacatttggcaataaagtttcttaagattgaatcctgttgccggtcttgcgatgattatcatataatttctgttgaattacgttaagcatgtaataattaacatgtaatgcatgacgttatttatgagatgggtttttatgattagagtcccgcaattatacatttaatacgcgatagaaaacaaaatatagcgcgcaaactaggataaattatcgcgcgcggtgtcatctatgttactagatcgggaattctagtggccggcccagctgatatctagacccagctttcttgtacaaagtggccgttaacggatcggccagaatggcccggaccgggttaccgaattcgagctcggtaccctgggatccgatatcgatgggccctggccgaagcttggtcacccggtccgggcctagaaggccagcttcggccgccccgggcaactttattatacaaagttgatggtacggatccgtcgacggcgcgccgcggacctgaattccagcacactggcggccgttagtctaaaaacggcccctaactaacgcttagttgcccgctagattagtcccccgttagtgcctagttagacacacgacgaactaggggctactagtaacggccgccagtgtgctcggtacggccagaatggccatctggattcagcagggggtgattgcggttacatcatgtacggaaaaataattctaatccttgatttaaatttgaacttgactatttatttattctttatttcattttgtaaatcattttatgtatctcctggcaagcaattttatccaccttgcaccaacaccttcgggttccataatcaaaccaccttaacttcacaccatgctgtaactcacaccgcccagcatctccaatgtgaaagaagctaaaatttaataaacaatcatacgaagcagtgacaaaataccagatggtattaatgcttcgataaaattaattggaaagtataaaatggtagaaaataataaattataattaatttaagtaagataaaaaataattaaaaactaaaatgttaaaattttaaaaaaattattttaaataatatttaaaaacattaaaaatcattttaaaaaatttatttatagaacaattaaataaatatttcagctaataaaaaacaaaagcttacctagccttagaagacaacttgtccaacaattagatgatacccattgcccttacgttttctttaacatcaattattgtttttgtcaacaagctatcttttagttttattttattggtaaaaaatatgtcgccttcaagttgcatcatttaacacatctcgtcattagaaaaataaaactcttccctaaacgattagtagaaaaaatcattcgataataaataagaaagaaaaattagaaaaaaataacttcattttaaaaaaatcattaaggctatattttttaaatgactaattttatatagactgtaactaaaagtatacaatttattatgctatgtatcttaaagaattacttataaaaatctacggaagaatatcttacaaagtgaaaaacaaatgagaaagaatttagtgggatgattatgattttatttgaaaattgaaaaaataattattaaagactttagtggagtaagaaagctttcctattagtcttttcttatccataaaaaaaaaaaaaaaaatctagcgtgacagcttttccatagattttaataatgtaaaatactggtagcagccgaccgttcaggtaatggacactgtggtcctaacttgcaacgggtgcgggcccaatttaataacgccgtggtaacggataaagccaagcgtgaagcggtgaaggtacatctctgactccgtcaagattacgaaaccgtcaactacgaaggactccccgaaatatcatctgtgtcataaacaccaagtcacaccatacatgggcacgcgtcacaatatgattggagaacggttccaccgcatatgctataaaatgcccccacacccctcgaccctaatcgcacttcaattgcaatcaaattagttcattctctttgcgcagttccctacctctcctttcaaggttcgtagatttcttccgtttttttttcttcttctttattgtttgttctacatcagcatgatgttgatttgattgtgttttctatcgtttcatcgattataaattttcataatcagaagattcagcttttattaatgcaagaacgtccttaattgatgattttataaccgtaaattaggtctaattagagtttttttcataaagattttcagatccgtttacaacaagccttaattgttgattctgtagtcgtagattaaggtttttttcatgaactacttcagatccgttaaacaacagccttatttgttgatacttcagtcgtttttcaagaaattgttcagatccgttgataaaagccttattcgttgattctgtatggtatttcaagagatattgctcaggtcctttagcaactaccttatttgttgattctgtggccatagattaggattttttttcacgaaattgcttcttgaaattacgtgatggattttgattctgatttatcttgtgattgttgactctacagccatggctgcaactactcttacatctgctttacctggtgctttcagttcatcccagagaccaagtgctcctttcaacttacaaagatcacctagagtgcttagaaggttcaacagaaagacaggacgtcaacctcgtggacttgttcgtgctgcaaaggctcaagcggcgcaaaacctgccagagaaattcgatgaaacaagactctgggaggccctcaggggatttggggttagtccaagtagggttacttacgctcccgtcggattcggagattaccactggaccgtcacagatgaagacgggagaccttggttcgcaactgtcagtgacctcgaacacaaagagcattgcgggcagggagcacaagcagcccttaaaggactcagacaagctatggacactgccctcgcacttagagatagggacggactcagattcgtggttgctccagtggcagcaacagatgggggtggccctgtccttccccttgacgctaggtatgcactcacagtcttccctcacgtcccaggaagaacaggagagttcggacaaagactcacagaggcagagagggacagactgcttgctcttctggcagaactccacggaagaacacctcctgaaacaaccccaccagccgatatggaaccaccaggacttcctggtgttagagcagcactcgccgaaagtgaaggaccttggagtggaggaccatttgcagaacccgctagacttcttctcagagaacacgaggccacactgcacgcaagactcgctgaattcgaagccctcgtcgcaagagttaagggtcgtggagcacctcttgtcgttacccacggagaaccacacccaggcaacttgatcctcggagaggaaggctatctcctcgtggactgggatacagttggactggctccagctgaaagggatttgagtctcatctcagacgacccagctgacctcgcaagatacgcagagcttacaggaagaactccagacccagacgcactcgcactctatagactgcgttggagtctccttgatgtggctgagttcgtcgagtggttcagggctgaacaccaaagaacccaagacaccgagagtgcatggaaggggttcactgacacacttgggcaattggctgctggtggatcagctgcatagcaaacttatctctgttatgaatcagaagaagttcatgtctcgtttcatttaaaactttggtggtttgtgttttggggccttgtaaagcccctgatgaataattgttcaactatgtttccgttcctgtgttatacctttctttctaatgagtaatgacatcaaacttcttctgtattgaaattatgtccttgtgagtctctttatcatcgtttcgtctttacattatatgtgctacttttgtctaatgagcctgaaaagtggctccaatggtacgcactggaagatttgttggcttctggtagatatagcgacagtgttgagcttgtaatatcatgtctcttattgctaaattagttcctttcttaacagaaaccttcaaagtttttgtttttgttttcatttacctaatgtacacatacgctggccatgactaacaacatgtccaggcttagagcatatttttttctagcttaaattgttaacttgtcattcagtaaaatccgagaattgtgaagctctaattgaagctaattcgttttataaagtcagttaaaaagtatactaaattatccaacttttcttcaaaatctcaaaattctatgacaaaacgatagtctttgtttatgtcagtaccacaaagaggtggaaaaaaacaccaaaaaaacaataagcaaactatacactgagaagaaaaataaaagagagctcaatagatgttttatactaacggtagattagatcaaagatccaagctttactctacatagagcagaacccagaatcccttcatatctcttttattctagcaccgataatctactgaaaagaagacacttagagctctgtctctttgtcaaagaagtcccagccgtcatccagaagctccttacgttcattaacagaggccgcaattggatcgggtttacttattttgtgggtatctatacttttattagatttttaatcaggctcctgatttctttttatttcgattgaattcctgaacttgtattattcagtagatcgaataaattataaaaagataaaatcataaaataatattttatcctatcaatcatattaaagcaatgaatatgtaaaattaatcttatctttattttaaaaaatcatataggtttagtatttttttaaaaataaagataggattagttttactattcactgcttattacttttaaaaaaatcataaaggtttagtatttttttaaaataaatataggaatagttttactattcactgctttaatagaaaaatagtttaaaatttaagatagttttaatcccagcatttgccacgtttgaacgtgagccgaaacgatgtcgttacattatcttaacctagctgaaacgatgtcgtcataatatcgccaaatgccaactggactacgtcgaacccacaaatcccacaaagcgcgtgaaatcaaatcgctcaaaccacaaaaaagaacaacgcgtttgttacacgctcaatcccacgcgagtagagcacagtaaccttcaaataagcgaatggggcataatcagaaatccgaaataaacctaggggcattatcggaaatgaaaagtagctcactcaatataaaaatctaggaaccctagttttcgttatcactctgtgctccctcgctctatttctcagtctctgtgtttgcggctgaggattccgaacgagtgaccttcttcgtttctcgcaaaggtaacagcctctgctcttgtctcttcgattcgatctatgcctgtctcttatttacgatgatgtttcttcggttatgtttttttatttatgctttatgctgttgatgttcggttgtttgtttcgctttgtttttgtggttcagttttttaggattcttttggtttttgaatcgattaatcggaagagattttcgagttatttggtgtgttggaggtgaatcttttttttgaggtcatagatctgttgtatttgtgttataaacatgcgactttgtatgattttttacgaggttatgatgttctggttgttttattatgaatctgttgagacagaaccatgatttttgttgatgttcgtttacactattaaaggtttgttttaacaggattaaaagttttttaagcatgttgaaggagtcttgtagatatgtaaccgtcgatagtttttttgtgggtttgttcacatgttatcaagcttaatcttttactatgtatgcgaccatatctggatccagcaaaggcgattttttaattccttgtgaaacttttgtaatatgaagttgaaattttgttattggtaaactataaatgtgtgaagttggagtatacctttaccttcttatttggctttgtgatagtttaatttatatgtattttgagttctgacttgtatttctttgaattgattctagtttaagtaatcatggcctcctccgagaacgtcatcaccgagttcatgcgcttcaaggtgcgcatggagggcaccgtgaacggccacgagttcgagatcgagggcgagggcgagggccgcccctacgagggccacaacaccgtgaagctgaaggtgacgaagggcggccccctgcccttcgcctgggacatcctgtccccccagttccagtacggctccaaggtgtacgtgaagcaccccgccgacatccccgactacaagaagctgtccttccccgagggcttcaagtgggagcgcgtgatgaacttcgaggacggcggcgtggcgaccgtgacccaggactcctccctgcaggacggctgcttcatctacaaggtgaagttcatcggcgtgaacttcccctccgacggccccgtgatgcagaagaagaccatgggctgggaggcctccaccgagcgcctgtacccccgcgacggcgtgctgaagggcgagacccacaaggccctgaagctgaaggacggcggccactacctggtggagttcaagtccatctacatggccaagaagcccgtgcagctgcccggctactactacgtggacgccaagctggacatcacctcccacaacgaggactacaccatcgtggagcagtacgagcgcaccgagggccgccaccacctgttcctgtagttttgtgatctgatgataagtggttggttcgtgtctcatgcacttgggaggtgatctatttcacctggtgtagtttgtgtttccgtcagttggaaaaacttatccctatcgatttcgttttcattttctgcttttcttttatgtaccttcgtttgggcttgtaacgggcctttgtatttcaactctcaataataatccaagtgcatgttaaacaatttgtcatctgtttcggctttgatatactactggtgaagatgggccgtactactgcatcacaacgaaaaataataataagatgaaaaacttgaagtggaaaaaaaaaaaaacttgaatgttcactactactcattgaccataatgtttaacatacatagctcaatagtatttttgtgaatatggcaacacaaacagtccaaaacaattgtctcttactataccaaaccaagggcgccgcttgtttgccactctttgtgtgcaatagtgtgattaccacatctccacattcaatatattccctgaattatctgacgattttgatggctcactgttttcccaagtcttgaattgtcttctgtgcgccagtcaaatgcatatgtgttgagtttatcttttaaatatcaagcttttgtttttaacttttgtttgtaaccaaaaactcacagtaggagtttgatcacataattttatgtttgcctttgcaatttctagtgagtctttgattaaaagcttgaaaagaaaatgcagccaagcttaccaagtaagttatgtgtattaaccagaggaagagagaatcttgcaaaatttcaacaaacacaaaaagaagtattactacgattggtggagaaagaaaacgattccaaatcttgaactgttgttgtaaaagcatagcagaaagtgggagacaaccgaaatagaaatgactataacttaatttaatgttatcattataatttcttctagcaaatatttagaaagtaaatatcacatcaacctttaatgtaattaagctttctctttttgattcatgtgagatgaaaagaaaaaaaagaagagaaaagtgtagaaaacacatcatttctaagctgaagctgaggtacaaattaattaataagtgactagggtcacgtgaccctagtcacttatgattccgatgacttcgtaggttcctagctcaagccgctcgtgtccaagcgtcacttacgattagctaatgattacggcatctaggaccgactagttcttatgtgcttctagtctccaaatgtggttgatagttattttgctctaagatcaacagtaatgaagtataaatcatcgttgtggtgtgctactcggttaattgagcattaacacacacaaacatgacgaggatggtataatctccaaaaatgtgtactttgttaggtgggaccctatagccttgattaatgtgctatgttaggcatgcctggaaacgtgtgacgcatatgttttgtgaacctgttgatattatatgtgcttttatattaccatattttattaaaatactaatatttattactagtaagatataacattctatctagcttaaaaactaaccataaatattccataataactagatttaccaaactaatatactaaatatacataataaatacaaaattaacaagacaataatcaatatttatgagcttaatatatttagacattatggttggtcgacgataatcatgctaacttttcgtaattgcttgattgaaatatgcttagaataatgcctctttgttctacatggcaaatagggaccattatggtgtaacaccctgggaaccacaaacaccccgaaatgctactaaactacacaactaaccttcatatataaaatttcgacagcatctcctttgaaaatttgcatagacgtggaagcaacagagtataaacagatctagctagctaagtttaaacggccggccaaacgtgcaagcgctactagacaattcagtacattaaaaacgtccgcaatgtgttattaagttgtctaagcgtcaatttatttacaattgaatatatcctgcca

SEQ ID NO: 159 - DNA, 15431 bp, Artificial Sequence
  RV026523 T-DNA
aattacaacggtatatatcctgtcagccaacaccaaaacatcaaaaaaatcgggatcaggatcaggatctgcggccgcatcctgcaggtttaaacggccggccttcactagctagctgctaagctcaaacgagcaggaagcaacgagagggtggcgcgcgaccgacgtgcgtacgtagcatgagcctgagtggagacgttggacgtgtatgtatatacctctctgcgtgttaactatgtacgtaagcggcaggcagtgcaataagtgtggctctgtagtatgtacgtgcgggtacgatgctgtaagctactgaggcaagtccataaataaataatgacacgtgcgtgttctataatctcttcgcttcttcatttgtccccttgcggagtttggcatccattgatgccgttacgctgagaacagacacagcagacgaaccaaaagtgagttcttgtatgaaactatgacccttcatcgctaggctcaaacagcaccccgtacgaacacagcaaattagtcatctaactattagcccctacatgtttcagacgatacataaatatagcccatccttagcaattagctattggccctgcccatcccaagcaatgatctcgaagtatttttaatatatagtatttttaatatgtagcttttaaaattagaagataattttgagacaaaaatctccaagtatttttttgggtattttttactgcctccgtttttctttatttctcgtcacctagtttaattttgtgctaatcggctataaacgaaacagagagaaaagttactctaaaagcaactccaacagattagatataaatcttatatcctgcctagagctgttaaaaagatagacaactttagtggattagtgtatgcaacaaactctccaaatttaagtatcccaactacccaacgcatatcgttcccttttcattggcgcacgaactttcacctgctatagccgacgtacatgttcgttttttttgggcggcgcttactttcttccccgttcgttctcagcatcgcaactcaatttgttatggcggagaagcccttgtatcccaggtagtaatgcacagatatgcattattattattcataaaatcgagctagttaccctatgaggtgacatgaagcgctcacggttactatgacggttagcttcacgactgttggtggcagtagcgtacgacttagctatagttccggacttacctaactgactagagtcacacttagctgaccctagtcacttaggcgcgccaagcttggatctcctgcaggatctggccggccggatgggcggatctcgtacctcaactttgtatagaaaagttgggccagaatggcccggaccgggttaccaagcggccgcgaattccagaagaccaaagggcaattgagacttttcaacaaagggtaatatcgggaaacctcctcggattccattgcccagctatctgtcacttcatcaaaaggacagtagaaaaggaaggtggcacctacaaatgccatcattgcgataaaggaaaggctatcgttcaagatgcctctgccgacagtggtcccaaagatggacccccacccacgaggagcatcgtggaaaaagaagacgttccaaccacgtcttcaaagcaagtggattgatgtgatatctccactgacgtaagggatgacgcacaatcccactatccttcgcaagacccttcctctatataaggaagttcatttcatttggagaggacccatggaagctcaacagcaacagcataatacaatgatgggtgatgaccttggcggtggcaagttggcagccaccagcttcacaagagcgcaaaccaacagcagcaacaaccacagcctagttaataacaacggcggcagaagaagcagcacgaggtggacaccaacaacagaccagataagaatactcaaagatctttactacaacaatggagtgaggtctcccacggtggagcagattcagaggatctctgctaggttgagacagtacggtaagatcgagggcaaaaatgtcttctactggtttcagaaccaaaaggctcgtgaaagacagaagaggaggttcaacacaaccagcaccaccaacaacaacactgctcccgctcctctccctccatcttctactgtttgtaaaccttcttcgctagactcatccactccacacattcacactgcagcagcagctgctgctgctgcctccaaatactcagacatcaacaacaaccaaaaccttatctacccagctgggcacaatcagatgtcaggtttcggatatgctgcctccgtaacaatggagaagagcttcagagattgttctatatcgacgggcgggtcatctttcggttgggctaaaggaggaatgacagatcaccatctgtctcgtcatccctacccgcacacttcaccctatgcaatctacaaccagcggaaatcaataaacagtgatgagtatcacgagctactggcatcatcaacttcggatcatcatgaacatggggataatcggggtccggagattgaaaccctgccactatttcccatgcacggcgaggacatcaactacggcttctgccaccttaattcagccgagactgatggctggttcaatcgcgatgtgggtagtggctctcgtgcgtccctcgagctcagtctcaactcttacgcaggaatggaccacacctagggtacctgacatcttatagtctgcaacctctcgtgtctgaattcctatctttatcaagtgttattgcttccacgactataggacagctttcgtcgaaaggttttgctcatgtgatctcgaaggattcatctagtctgatttttcgtgacttgtatcggttttattggattcatccaacatatatcaataaaaaatgagttgtgtttcctttcttcctagttcagttaaaattatttccctcctgcgcttgtgctgtaattgtctgtgtacctgttgtttgtgactgtgttagttcccttggatatgatttcgtatttgatatgtacatggagatagcttagcttcattattggagtatgaagttagtatgacatagtcactctcctggaaaattgacactgcaaaccatatttttattctgaaccacaaatcctagtcagtccgctggcatatgccgtccgtttgctgaatccagaacgtgggtttggagatgtacggctgagatgcctctatgcgaaggggatttcgtggtgaaacgagatgggagtagagcaacgcccgtggaagatgcttcaaacttccacacttttgagcaacgatcggcagtagtaaggtagacgatttcaagatcaaagcatatgaagataaacaacatcaacaacaaaatttgttggggttctatagagagaaacagagctacatacatacactgttttgtatctaccatctgagatgatgaaaagatgaaaaactaaagaatgccccggcgccaacgccaggacacgccgcgcgcgcgtcacccgagccatctcttgacccagccggcgctgtatatttacacacgttgcagcatcgatcaccacctgttcgatcgcgtcgccgtcaccaagcttggcgcgccggtcacccggtccgggcctagaaggccacccggggctcggcgttaggcttttagtccgctaggtggctagaccgaggttaggacgctagttcactaggggcctagtggtgttttaaggatgggcaagtttgtacaaaaaagcaggctggcgccggaaccaattcagtcgagtgcggccgccagtgtgatggatatctcgacccgggtgattgcggttacatcatgtacggaaaaataattctaatccttgatttaaatttgaacttgactatttatttattctttatttcattttgtaaatcattttatgtatctcctggcaagcaattttatccaccttgcaccaacaccttcgggttccataatcaaaccaccttaacttcacaccatgctgtaactcacaccgcccagcatctccaatgtgaaagaagctaaaatttaataaacaatcatacgaagcagtgacaaaataccagatggtattaatgcttcgataaaattaattggaaagtataaaatggtagaaaataataaattataattaatttaagtaagataaaaaataattaaaaactaaaatgttaaaattttaaaaaaattattttaaataatatttaaaaacattaaaaatcattttaaaaaatttatttatagaacaattaaataaatatttcagctaataaaaaacaaaagcttacctagccttagaagacaacttgtccaacaattagatgatacccattgcccttacgttttctttaacatcaattattgtttttgtcaacaagctatcttttagttttattttattggtaaaaaatatgtcgccttcaagttgcatcatttaacacatctcgtcattagaaaaataaaactcttccctaaacgattagtagaaaaaatcattcgataataaataagaaagaaaaattagaaaaaaataacttcattttaaaaaaatcattaaggctatattttttaaatgactaattttatatagactgtaactaaaagtatacaatttattatgctatgtatcttaaagaattacttataaaaatctacggaagaatatcttacaaagtgaaaaacaaatgagaaagaatttagtgggatgattatgattttatttgaaaattgaaaaaataattattaaagactttagtggagtaagaaagctttcctattagtcttttcttatccataaaaaaaaaaaaaaaaatctagcgtgacagcttttccatagattttaataatgtaaaatactggtagcagccgaccgttcaggtaatggacactgtggtcctaacttgcaacgggtgcgggcccaatttaataacgccgtggtaacggataaagccaagcgtgaagcggtgaaggtacatctctgactccgtcaagattacgaaaccgtcaactacgaaggactccccgaaatatcatctgtgtcataaacaccaagtcacaccatacatgggcacgcgtcacaatatgattggagaacggttccaccgcatatgctataaaatgcccccacacccctcgaccctaatcgcacttcaattgcaatcaaattagttcattctctttgcgcagttccctacctctcctttcaaggttcgtagatttcttccgtttttttttcttcttctttattgtttgttctacatcagcatgatgttgatttgattgtgttttctatcgtttcatcgattataaattttcataatcagaagattcagcttttattaatgcaagaacgtccttaattgatgattttataaccgtaaattaggtctaattagagtttttttcataaagattttcagatccgtttacaacaagccttaattgttgattctgtagtcgtagattaaggtttttttcatgaactacttcagatccgttaaacaacagccttatttgttgatacttcagtcgtttttcaagaaattgttcagatccgttgataaaagccttattcgttgattctgtatggtatttcaagagatattgctcaggtcctttagcaactaccttatttgttgattctgtggccatagattaggattttttttcacgaaattgcttcttgaaattacgtgatggattttgattctgatttatcttgtgattgttgactctacagccatggcccacagcaagcacggcctgaaggaggagatgaccatgaagtaccacatggagggctgcgtgaacggccacaagttcgtgatcaccggcgagggcatcggctaccccttcaagggcaagcagaccatcaacctgtgcgtgatcgagggcggccccctgcccttcagcgaggacatcctgagcgccggcttcaagtacggcgaccggatcttcaccgagtacccccaggacatcgtggactacttcaagaacagctgccccgccggctacacctggggccggagcttcctgttcgaggacggcgccgtgtgcatctgtaacgtggacatcaccgtgagcgtgaaggagaactgcatctaccacaagagcatcttcaacggcgtgaacttccccgccgacggccccgtgatgaagaagatgaccaccaactgggaggccagctgcgagaagatcatgcccgtgcctaagcagggcatcctgaagggcgacgtgagcatgtacctgctgctgaaggacggcggccggtaccggtgccagttcgacaccgtgtacaaggccaagagcgtgcccagcaagatgcccgagtggcacttcatccagcacaagctgctgcgggaggaccggagcgacgccaagaaccagaagtggcagctgaccgagcacgccatcgccttccccagcgccctggcctgagagctcgaatttccccgatcgttcaaacatttggcaataaagtttcttaagattgaatcctgttgccggtcttgcgatgattatcatataatttctgttgaattacgttaagcatgtaataattaacatgtaatgcatgacgttatttatgagatgggtttttatgattagagtcccgcaattatacatttaatacgcgatagaaaacaaaatatagcgcgcaaactaggataaattatcgcgcgcggtgtcatctatgttactagatcgggaattctagtggccggcccagctgatatctagacccagctttcttgtacaaagtggccgttaacggatcggccagaatggcccggaccgggttaccgaattcgagctcggtaccctgggatccgatatcgatgggccctggccgaagcttggtcacccggtccgggcctagaaggccagcttcggccgccccgggcaactttattatacaaagttgatggtacggatccgtcgacggcgcgccgcggacctgaattccagcacactggcggccgttagtctaaaaacggcccctaactaacgcttagttgcccgctagattagtcccccgttagtgcctagttagacacacgacgaactaggggctactagtaacggccgccagtgtgctcggtacggccagaatggccatctggattcagcagggggtgattgcggttacatcatgtacggaaaaataattctaatccttgatttaaatttgaacttgactatttatttattctttatttcattttgtaaatcattttatgtatctcctggcaagcaattttatccaccttgcaccaacaccttcgggttccataatcaaaccaccttaacttcacaccatgctgtaactcacaccgcccagcatctccaatgtgaaagaagctaaaatttaataaacaatcatacgaagcagtgacaaaataccagatggtattaatgcttcgataaaattaattggaaagtataaaatggtagaaaataataaattataattaatttaagtaagataaaaaataattaaaaactaaaatgttaaaattttaaaaaaattattttaaataatatttaaaaacattaaaaatcattttaaaaaatttatttatagaacaattaaataaatatttcagctaataaaaaacaaaagcttacctagccttagaagacaacttgtccaacaattagatgatacccattgcccttacgttttctttaacatcaattattgtttttgtcaacaagctatcttttagttttattttattggtaaaaaatatgtcgccttcaagttgcatcatttaacacatctcgtcattagaaaaataaaactcttccctaaacgattagtagaaaaaatcattcgataataaataagaaagaaaaattagaaaaaaataacttcattttaaaaaaatcattaaggctatattttttaaatgactaattttatatagactgtaactaaaagtatacaatttattatgctatgtatcttaaagaattacttataaaaatctacggaagaatatcttacaaagtgaaaaacaaatgagaaagaatttagtgggatgattatgattttatttgaaaattgaaaaaataattattaaagactttagtggagtaagaaagctttcctattagtcttttcttatccataaaaaaaaaaaaaaaaatctagcgtgacagcttttccatagattttaataatgtaaaatactggtagcagccgaccgttcaggtaatggacactgtggtcctaacttgcaacgggtgcgggcccaatttaataacgccgtggtaacggataaagccaagcgtgaagcggtgaaggtacatctctgactccgtcaagattacgaaaccgtcaactacgaaggactccccgaaatatcatctgtgtcataaacaccaagtcacaccatacatgggcacgcgtcacaatatgattggagaacggttccaccgcatatgctataaaatgcccccacacccctcgaccctaatcgcacttcaattgcaatcaaattagttcattctctttgcgcagttccctacctctcctttcaaggttcgtagatttcttccgtttttttttcttcttctttattgtttgttctacatcagcatgatgttgatttgattgtgttttctatcgtttcatcgattataaattttcataatcagaagattcagcttttattaatgcaagaacgtccttaattgatgattttataaccgtaaattaggtctaattagagtttttttcataaagattttcagatccgtttacaacaagccttaattgttgattctgtagtcgtagattaaggtttttttcatgaactacttcagatccgttaaacaacagccttatttgttgatacttcagtcgtttttcaagaaattgttcagatccgttgataaaagccttattcgttgattctgtatggtatttcaagagatattgctcaggtcctttagcaactaccttatttgttgattctgtggccatagattaggattttttttcacgaaattgcttcttgaaattacgtgatggattttgattctgatttatcttgtgattgttgactctacagccatggctgcaactactcttacatctgctttacctggtgctttcagttcatcccagagaccaagtgctcctttcaacttacaaagatcacctagagtgcttagaaggttcaacagaaagacaggacgtcaacctcgtggacttgttcgtgctgcaaaggctcaagcggcgcaaaacctgccagagaaattcgatgaaacaagactctgggaggccctcaggggatttggggttagtccaagtagggttacttacgctcccgtcggattcggagattaccactggaccgtcacagatgaagacgggagaccttggttcgcaactgtcagtgacctcgaacacaaagagcattgcgggcagggagcacaagcagcccttaaaggactcagacaagctatggacactgccctcgcacttagagatagggacggactcagattcgtggttgctccagtggcagcaacagatgggggtggccctgtccttccccttgacgctaggtatgcactcacagtcttccctcacgtcccaggaagaacaggagagttcggacaaagactcacagaggcagagagggacagactgcttgctcttctggcagaactccacggaagaacacctcctgaaacaaccccaccagccgatatggaaccaccaggacttcctggtgttagagcagcactcgccgaaagtgaaggaccttggagtggaggaccatttgcagaacccgctagacttcttctcagagaacacgaggccacactgcacgcaagactcgctgaattcgaagccctcgtcgcaagagttaagggtcgtggagcacctcttgtcgttacccacggagaaccacacccaggcaacttgatcctcggagaggaaggctatctcctcgtggactgggatacagttggactggctccagctgaaagggatttgagtctcatctcagacgacccagctgacctcgcaagatacgcagagcttacaggaagaactccagacccagacgcactcgcactctatagactgcgttggagtctccttgatgtggctgagttcgtcgagtggttcagggctgaacaccaaagaacccaagacaccgagagtgcatggaaggggttcactgacacacttgggcaattggctgctggtggatcagctgcatagcaaacttatctctgttatgaatcagaagaagttcatgtctcgtttcatttaaaactttggtggtttgtgttttggggccttgtaaagcccctgatgaataattgttcaactatgtttccgttcctgtgttatacctttctttctaatgagtaatgacatcaaacttcttctgtattgaaattatgtccttgtgagtctctttatcatcgtttcgtctttacattatatgtgctacttttgtctaatgagcctgaaaagtggctccaatggtacgcactggaagatttgttggcttctggtagatatagcgacagtgttgagcttgtaatatcatgtctcttattgctaaattagttcctttcttaacagaaaccttcaaagtttttgtttttgttttcatttacctaatgtacacatacgctggccatgactaacaacatgtccaggcttagagcatatttttttctagcttaaattgttaacttgtcattcagtaaaatccgagaattgtgaagctctaattgaagctaattcgttttataaagtcagttaaaaagtatactaaattatccaacttttcttcaaaatctcaaaattctatgacaaaacgatagtctttgtttatgtcagtaccacaaagaggtggaaaaaaacaccaaaaaaacaataagcaaactatacactgagaagaaaaataaaagagagctcaatagatgttttatactaacggtagattagatcaaagatccaagctttactctacatagagcagaacccagaatcccttcatatctcttttattctagcaccgataatctactgaaaagaagacacttagagctctgtctctttgtcaaagaagtcccagccgtcatccagaagctccttacgttcattaacagaggccgcaattggatcgggtttacttattttgtgggtatctatacttttattagatttttaatcaggctcctgatttctttttatttcgattgaattcctgaacttgtattattcagtagatcgaataaattataaaaagataaaatcataaaataatattttatcctatcaatcatattaaagcaatgaatatgtaaaattaatcttatctttattttaaaaaatcatataggtttagtatttttttaaaaataaagataggattagttttactattcactgcttattacttttaaaaaaatcataaaggtttagtatttttttaaaataaatataggaatagttttactattcactgctttaatagaaaaatagtttaaaatttaagatagttttaatcccagcatttgccacgtttgaacgtgagccgaaacgatgtcgttacattatcttaacctagctgaaacgatgtcgtcataatatcgccaaatgccaactggactacgtcgaacccacaaatcccacaaagcgcgtgaaatcaaatcgctcaaaccacaaaaaagaacaacgcgtttgttacacgctcaatcccacgcgagtagagcacagtaaccttcaaataagcgaatggggcataatcagaaatccgaaataaacctaggggcattatcggaaatgaaaagtagctcactcaatataaaaatctaggaaccctagttttcgttatcactctgtgctccctcgctctatttctcagtctctgtgtttgcggctgaggattccgaacgagtgaccttcttcgtttctcgcaaaggtaacagcctctgctcttgtctcttcgattcgatctatgcctgtctcttatttacgatgatgtttcttcggttatgtttttttatttatgctttatgctgttgatgttcggttgtttgtttcgctttgtttttgtggttcagttttttaggattcttttggtttttgaatcgattaatcggaagagattttcgagttatttggtgtgttggaggtgaatcttttttttgaggtcatagatctgttgtatttgtgttataaacatgcgactttgtatgattttttacgaggttatgatgttctggttgttttattatgaatctgttgagacagaaccatgatttttgttgatgttcgtttacactattaaaggtttgttttaacaggattaaaagttttttaagcatgttgaaggagtcttgtagatatgtaaccgtcgatagtttttttgtgggtttgttcacatgttatcaagcttaatcttttactatgtatgcgaccatatctggatccagcaaaggcgattttttaattccttgtgaaacttttgtaatatgaagttgaaattttgttattggtaaactataaatgtgtgaagttggagtatacctttaccttcttatttggctttgtgatagtttaatttatatgtattttgagttctgacttgtatttctttgaattgattctagtttaagtaatcatggcctcctccgagaacgtcatcaccgagttcatgcgcttcaaggtgcgcatggagggcaccgtgaacggccacgagttcgagatcgagggcgagggcgagggccgcccctacgagggccacaacaccgtgaagctgaaggtgacgaagggcggccccctgcccttcgcctgggacatcctgtccccccagttccagtacggctccaaggtgtacgtgaagcaccccgccgacatccccgactacaagaagctgtccttccccgagggcttcaagtgggagcgcgtgatgaacttcgaggacggcggcgtggcgaccgtgacccaggactcctccctgcaggacggctgcttcatctacaaggtgaagttcatcggcgtgaacttcccctccgacggccccgtgatgcagaagaagaccatgggctgggaggcctccaccgagcgcctgtacccccgcgacggcgtgctgaagggcgagacccacaaggccctgaagctgaaggacggcggccactacctggtggagttcaagtccatctacatggccaagaagcccgtgcagctgcccggctactactacgtggacgccaagctggacatcacctcccacaacgaggactacaccatcgtggagcagtacgagcgcaccgagggccgccaccacctgttcctgtagttttgtgatctgatgataagtggttggttcgtgtctcatgcacttgggaggtgatctatttcacctggtgtagtttgtgtttccgtcagttggaaaaacttatccctatcgatttcgttttcattttctgcttttcttttatgtaccttcgtttgggcttgtaacgggcctttgtatttcaactctcaataataatccaagtgcatgttaaacaatttgtcatctgtttcggctttgatatactactggtgaagatgggccgtactactgcatcacaacgaaaaataataataagatgaaaaacttgaagtggaaaaaaaaaaaaacttgaatgttcactactactcattgaccataatgtttaacatacatagctcaatagtatttttgtgaatatggcaacacaaacagtccaaaacaattgtctcttactataccaaaccaagggcgccgcttgtttgccactctttgtgtgcaatagtgtgattaccacatctccacattcaatatattccctgaattatctgacgattttgatggctcactgttttcccaagtcttgaattgtcttctgtgcgccagtcaaatgcatatgtgttgagtttatcttttaaatatcaagcttttgtttttaacttttgtttgtaaccaaaaactcacagtaggagtttgatcacataattttatgtttgcctttgcaatttctagtgagtctttgattaaaagcttgaaaagaaaatgcagccaagcttaccaagtaagttatgtgtattaaccagaggaagagagaatcttgcaaaatttcaacaaacacaaaaagaagtattactacgattggtggagaaagaaaacgattccaaatcttgaactgttgttgtaaaagcatagcagaaagtgggagacaaccgaaatagaaatgactataacttaatttaatgttatcattataatttcttctagcaaatatttagaaagtaaatatcacatcaacctttaatgtaattaagctttctctttttgattcatgtgagatgaaaagaaaaaaaagaagagaaaagtgtagaaaacacatcatttctaagctgaagctgaggtacaaattaattaataagtgactagggtcacgtgaccctagtcacttatgattccgatgacttcgtaggttcctagctcaagccgctcgtgtccaagcgtcacttacgattagctaatgattacggcatctaggaccgactagttcttatgtgcttctagtctccaaatgtggttgatagttattttgctctaagatcaacagtaatgaagtataaatcatcgttgtggtgtgctactcggttaattgagcattaacacacacaaacatgacgaggatggtataatctccaaaaatgtgtactttgttaggtgggaccctatagccttgattaatgtgctatgttaggcatgcctggaaacgtgtgacgcatatgttttgtgaacctgttgatattatatgtgcttttatattaccatattttattaaaatactaatatttattactagtaagatataacattctatctagcttaaaaactaaccataaatattccataataactagatttaccaaactaatatactaaatatacataataaatacaaaattaacaagacaataatcaatatttatgagcttaatatatttagacattatggttggtcgacgataatcatgctaacttttcgtaattgcttgattgaaatatgcttagaataatgcctctttgttctacatggcaaatagggaccattatggtgtaacaccctgggaaccacaaacaccccgaaatgctactaaactacacaactaaccttcatatataaaatttcgacagcatctcctttgaaaatttgcatagacgtggaagcaacagagtataaacagatctagctagctaagtttaaacggccggccaaacgtgcaagcgctactagacaattcagtacattaaaaacgtccgcaatgtgttattaagttgtctaagcgtcaatttatttacaattgaatatatcctgcca

SEQ ID NO: 160 - DNA, 15349 bp, Artificial Sequence
  RV026530 T-DNA
caaacaaacatacacagcgatttattcacacgaacccgaattacaacggtatatatcctgtcagccaacaccaaaacatcaaaaaaatcgggatcaggatcaggatctgcggccgcatcctgcaggtttaaacggccggccttcactagctagctgctaagctcaaacgagcaggaagcaacgagagggtggcgcgcgaccgacgtgcgtacgtagcatgagcctgagtggagacgttggacgtgtatgtatatacctctctgcgtgttaactatgtacgtaagcggcaggcagtgcaataagtgtggctctgtagtatgtacgtgcgggtacgatgctgtaagctactgaggcaagtccataaataaataatgacacgtgcgtgttctataatctcttcgcttcttcatttgtccccttgcggagtttggcatccattgatgccgttacgctgagaacagacacagcagacgaaccaaaagtgagttcttgtatgaaactatgacccttcatcgctaggctcaaacagcaccccgtacgaacacagcaaattagtcatctaactattagcccctacatgtttcagacgatacataaatatagcccatccttagcaattagctattggccctgcccatcccaagcaatgatctcgaagtatttttaatatatagtatttttaatatgtagcttttaaaattagaagataattttgagacaaaaatctccaagtatttttttgggtattttttactgcctccgtttttctttatttctcgtcacctagtttaattttgtgctaatcggctataaacgaaacagagagaaaagttactctaaaagcaactccaacagattagatataaatcttatatcctgcctagagctgttaaaaagatagacaactttagtggattagtgtatgcaacaaactctccaaatttaagtatcccaactacccaacgcatatcgttcccttttcattggcgcacgaactttcacctgctatagccgacgtacatgttcgttttttttgggcggcgcttactttcttccccgttcgttctcagcatcgcaactcaatttgttatggcggagaagcccttgtatcccaggtagtaatgcacagatatgcattattattattcataaaatcgagctagttaccctatgaggtgacatgaagcgctcacggttactatgacggttagcttcacgactgttggtggcagtagcgtacgacttagctatagttccggacttacctaactgactagagtcacacttagctgaccctagtcacttaggcgcgccaagcttggatctcctgcaggatctggccggccggatgggcggatctcgtacctcaactttgtatagaaaagttgggccagaatggcccggaccgggttaccaagcggccgcgaattccagaagaccaaagggcaattgagacttttcaacaaagggtaatatcgggaaacctcctcggattccattgcccagctatctgtcacttcatcaaaaggacagtagaaaaggaaggtggcacctacaaatgccatcattgcgataaaggaaaggctatcgttcaagatgcctctgccgacagtggtcccaaagatggacccccacccacgaggagcatcgtggaaaaagaagacgttccaaccacgtcttcaaagcaagtggattgatgtgatatctccactgacgtaagggatgacgcacaatcccactatccttcgcaagacccttcctctatataaggaagttcatttcatttggagaggacccatggaaccccagcaacagcaacagcaaaaccaacaagctccaaatgaggattgtggtggtggcagtggcaaaggaagctttctttgcaggcaaagtagtacacggtggactcctaccactgaccagattagaatattgaaggacctttactacaacaatggagttaggtccccgagtgctgatcagattcaaaggatctctgctagacttagacagtacggaaaaatcgaaggcaagaatgtcttttattggtttcagaaccacaaggctcgtgagaggcagaagaaaaggttcaccaccacgactaatcatcatgtccccatgcaaagccctaccactgctgcaaataacaagtatcccaacataactcctggttattctcctacatctctttcttcaactggtgctcttactgttgggcagataggaaactatggctatgggtctataactatggaaaagagttttagggattgctcaatatcagcatgtggtagtagtacaagtgtaggcgaatccctgagtcacaactttggatgggttgggttcgatcctacttattcttcgtcctacacattctttgagcacaaaaaattcatggaagagagacaaaaagatgaagatgatgcagaagaagaagctgctgctccacaaattgagaccctccctctctttcccatgcacagtgaagacgctaatggtttttgcagtaatattaggcccagactagacagctgctactctgggtggtacaggtctgaagatggctacactggttctcgtgcctcacttgagctcagcctcaacccatatgcaggcagaccgcaagattctatctgaggtacctgacatcttatagtctgcaacctctcgtgtctgaattcctatctttatcaagtgttattgcttccacgactataggacagctttcgtcgaaaggttttgctcatgtgatctcgaaggattcatctagtctgatttttcgtgacttgtatcggttttattggattcatccaacatatatcaataaaaaatgagttgtgtttcctttcttcctagttcagttaaaattatttccctcctgcgcttgtgctgtaattgtctgtgtacctgttgtttgtgactgtgttagttcccttggatatgatttcgtatttgatatgtacatggagatagcttagcttcattattggagtatgaagttagtatgacatagtcactctcctggaaaattgacactgcaaaccatatttttattctgaaccacaaatcctagtcagtccgctggcatatgccgtccgtttgctgaatccagaacgtgggtttggagatgtacggctgagatgcctctatgcgaaggggatttcgtggtgaaacgagatgggagtagagcaacgcccgtggaagatgcttcaaacttccacacttttgagcaacgatcggcagtagtaaggtagacgatttcaagatcaaagcatatgaagataaacaacatcaacaacaaaatttgttggggttctatagagagaaacagagctacatacatacactgttttgtatctaccatctgagatgatgaaaagatgaaaaactaaagaatgccccggcgccaacgccaggacacgccgcgcgcgcgtcacccgagccatctcttgacccagccggcgctgtatatttacacacgttgcagcatcgatcaccacctgttcgatcgcgtcgccgtcaccaagcttggcgcgccggtcacccggtccgggcctagaaggccacccggggctcggcgttaggcttttagtccgctaggtggctagaccgaggttaggacgctagttcactaggggcctagtggtgttttaaggatgggcaagtttgtacaaaaaagcaggctggcgccggaaccaattcagtcgagtgcggccgccagtgtgatggatatctcgacccgggtgattgcggttacatcatgtacggaaaaataattctaatccttgatttaaatttgaacttgactatttatttattctttatttcattttgtaaatcattttatgtatctcctggcaagcaattttatccaccttgcaccaacaccttcgggttccataatcaaaccaccttaacttcacaccatgctgtaactcacaccgcccagcatctccaatgtgaaagaagctaaaatttaataaacaatcatacgaagcagtgacaaaataccagatggtattaatgcttcgataaaattaattggaaagtataaaatggtagaaaataataaattataattaatttaagtaagataaaaaataattaaaaactaaaatgttaaaattttaaaaaaattattttaaataatatttaaaaacattaaaaatcattttaaaaaatttatttatagaacaattaaataaatatttcagctaataaaaaacaaaagcttacctagccttagaagacaacttgtccaacaattagatgatacccattgcccttacgttttctttaacatcaattattgtttttgtcaacaagctatcttttagttttattttattggtaaaaaatatgtcgccttcaagttgcatcatttaacacatctcgtcattagaaaaataaaactcttccctaaacgattagtagaaaaaatcattcgataataaataagaaagaaaaattagaaaaaaataacttcattttaaaaaaatcattaaggctatattttttaaatgactaattttatatagactgtaactaaaagtatacaatttattatgctatgtatcttaaagaattacttataaaaatctacggaagaatatcttacaaagtgaaaaacaaatgagaaagaatttagtgggatgattatgattttatttgaaaattgaaaaaataattattaaagactttagtggagtaagaaagctttcctattagtcttttcttatccataaaaaaaaaaaaaaaaatctagcgtgacagcttttccatagattttaataatgtaaaatactggtagcagccgaccgttcaggtaatggacactgtggtcctaacttgcaacgggtgcgggcccaatttaataacgccgtggtaacggataaagccaagcgtgaagcggtgaaggtacatctctgactccgtcaagattacgaaaccgtcaactacgaaggactccccgaaatatcatctgtgtcataaacaccaagtcacaccatacatgggcacgcgtcacaatatgattggagaacggttccaccgcatatgctataaaatgcccccacacccctcgaccctaatcgcacttcaattgcaatcaaattagttcattctctttgcgcagttccctacctctcctttcaaggttcgtagatttcttccgtttttttttcttcttctttattgtttgttctacatcagcatgatgttgatttgattgtgttttctatcgtttcatcgattataaattttcataatcagaagattcagcttttattaatgcaagaacgtccttaattgatgattttataaccgtaaattaggtctaattagagtttttttcataaagattttcagatccgtttacaacaagccttaattgttgattctgtagtcgtagattaaggtttttttcatgaactacttcagatccgttaaacaacagccttatttgttgatacttcagtcgtttttcaagaaattgttcagatccgttgataaaagccttattcgttgattctgtatggtatttcaagagatattgctcaggtcctttagcaactaccttatttgttgattctgtggccatagattaggattttttttcacgaaattgcttcttgaaattacgtgatggattttgattctgatttatcttgtgattgttgactctacagccatggcccacagcaagcacggcctgaaggaggagatgaccatgaagtaccacatggagggctgcgtgaacggccacaagttcgtgatcaccggcgagggcatcggctaccccttcaagggcaagcagaccatcaacctgtgcgtgatcgagggcggccccctgcccttcagcgaggacatcctgagcgccggcttcaagtacggcgaccggatcttcaccgagtacccccaggacatcgtggactacttcaagaacagctgccccgccggctacacctggggccggagcttcctgttcgaggacggcgccgtgtgcatctgtaacgtggacatcaccgtgagcgtgaaggagaactgcatctaccacaagagcatcttcaacggcgtgaacttccccgccgacggccccgtgatgaagaagatgaccaccaactgggaggccagctgcgagaagatcatgcccgtgcctaagcagggcatcctgaagggcgacgtgagcatgtacctgctgctgaaggacggcggccggtaccggtgccagttcgacaccgtgtacaaggccaagagcgtgcccagcaagatgcccgagtggcacttcatccagcacaagctgctgcgggaggaccggagcgacgccaagaaccagaagtggcagctgaccgagcacgccatcgccttccccagcgccctggcctgagagctcgaatttccccgatcgttcaaacatttggcaataaagtttcttaagattgaatcctgttgccggtcttgcgatgattatcatataatttctgttgaattacgttaagcatgtaataattaacatgtaatgcatgacgttatttatgagatgggtttttatgattagagtcccgcaattatacatttaatacgcgatagaaaacaaaatatagcgcgcaaactaggataaattatcgcgcgcggtgtcatctatgttactagatcgggaattctagtggccggcccagctgatatctagacccagctttcttgtacaaagtggccgttaacggatcggccagaatggcccggaccgggttaccgaattcgagctcggtaccctgggatccgatatcgatgggccctggccgaagcttggtcacccggtccgggcctagaaggccagcttcggccgccccgggcaactttattatacaaagttgatggtacggatccgtcgacggcgcgccgcggacctgaattccagcacactggcggccgttagtctaaaaacggcccctaactaacgcttagttgcccgctagattagtcccccgttagtgcctagttagacacacgacgaactaggggctactagtaacggccgccagtgtgctcggtacggccagaatggccatctggattcagcagggggtgattgcggttacatcatgtacggaaaaataattctaatccttgatttaaatttgaacttgactatttatttattctttatttcattttgtaaatcattttatgtatctcctggcaagcaattttatccaccttgcaccaacaccttcgggttccataatcaaaccaccttaacttcacaccatgctgtaactcacaccgcccagcatctccaatgtgaaagaagctaaaatttaataaacaatcatacgaagcagtgacaaaataccagatggtattaatgcttcgataaaattaattggaaagtataaaatggtagaaaataataaattataattaatttaagtaagataaaaaataattaaaaactaaaatgttaaaattttaaaaaaattattttaaataatatttaaaaacattaaaaatcattttaaaaaatttatttatagaacaattaaataaatatttcagctaataaaaaacaaaagcttacctagccttagaagacaacttgtccaacaattagatgatacccattgcccttacgttttctttaacatcaattattgtttttgtcaacaagctatcttttagttttattttattggtaaaaaatatgtcgccttcaagttgcatcatttaacacatctcgtcattagaaaaataaaactcttccctaaacgattagtagaaaaaatcattcgataataaataagaaagaaaaattagaaaaaaataacttcattttaaaaaaatcattaaggctatattttttaaatgactaattttatatagactgtaactaaaagtatacaatttattatgctatgtatcttaaagaattacttataaaaatctacggaagaatatcttacaaagtgaaaaacaaatgagaaagaatttagtgggatgattatgattttatttgaaaattgaaaaaataattattaaagactttagtggagtaagaaagctttcctattagtcttttcttatccataaaaaaaaaaaaaaaaatctagcgtgacagcttttccatagattttaataatgtaaaatactggtagcagccgaccgttcaggtaatggacactgtggtcctaacttgcaacgggtgcgggcccaatttaataacgccgtggtaacggataaagccaagcgtgaagcggtgaaggtacatctctgactccgtcaagattacgaaaccgtcaactacgaaggactccccgaaatatcatctgtgtcataaacaccaagtcacaccatacatgggcacgcgtcacaatatgattggagaacggttccaccgcatatgctataaaatgcccccacacccctcgaccctaatcgcacttcaattgcaatcaaattagttcattctctttgcgcagttccctacctctcctttcaaggttcgtagatttcttccgtttttttttcttcttctttattgtttgttctacatcagcatgatgttgatttgattgtgttttctatcgtttcatcgattataaattttcataatcagaagattcagcttttattaatgcaagaacgtccttaattgatgattttataaccgtaaattaggtctaattagagtttttttcataaagattttcagatccgtttacaacaagccttaattgttgattctgtagtcgtagattaaggtttttttcatgaactacttcagatccgttaaacaacagccttatttgttgatacttcagtcgtttttcaagaaattgttcagatccgttgataaaagccttattcgttgattctgtatggtatttcaagagatattgctcaggtcctttagcaactaccttatttgttgattctgtggccatagattaggattttttttcacgaaattgcttcttgaaattacgtgatggattttgattctgatttatcttgtgattgttgactctacagccatggctgcaactactcttacatctgctttacctggtgctttcagttcatcccagagaccaagtgctcctttcaacttacaaagatcacctagagtgcttagaaggttcaacagaaagacaggacgtcaacctcgtggacttgttcgtgctgcaaaggctcaagcggcgcaaaacctgccagagaaattcgatgaaacaagactctgggaggccctcaggggatttggggttagtccaagtagggttacttacgctcccgtcggattcggagattaccactggaccgtcacagatgaagacgggagaccttggttcgcaactgtcagtgacctcgaacacaaagagcattgcgggcagggagcacaagcagcccttaaaggactcagacaagctatggacactgccctcgcacttagagatagggacggactcagattcgtggttgctccagtggcagcaacagatgggggtggccctgtccttccccttgacgctaggtatgcactcacagtcttccctcacgtcccaggaagaacaggagagttcggacaaagactcacagaggcagagagggacagactgcttgctcttctggcagaactccacggaagaacacctcctgaaacaaccccaccagccgatatggaaccaccaggacttcctggtgttagagcagcactcgccgaaagtgaaggaccttggagtggaggaccatttgcagaacccgctagacttcttctcagagaacacgaggccacactgcacgcaagactcgctgaattcgaagccctcgtcgcaagagttaagggtcgtggagcacctcttgtcgttacccacggagaaccacacccaggcaacttgatcctcggagaggaaggctatctcctcgtggactgggatacagttggactggctccagctgaaagggatttgagtctcatctcagacgacccagctgacctcgcaagatacgcagagcttacaggaagaactccagacccagacgcactcgcactctatagactgcgttggagtctccttgatgtggctgagttcgtcgagtggttcagggctgaacaccaaagaacccaagacaccgagagtgcatggaaggggttcactgacacacttgggcaattggctgctggtggatcagctgcatagcaaacttatctctgttatgaatcagaagaagttcatgtctcgtttcatttaaaactttggtggtttgtgttttggggccttgtaaagcccctgatgaataattgttcaactatgtttccgttcctgtgttatacctttctttctaatgagtaatgacatcaaacttcttctgtattgaaattatgtccttgtgagtctctttatcatcgtttcgtctttacattatatgtgctacttttgtctaatgagcctgaaaagtggctccaatggtacgcactggaagatttgttggcttctggtagatatagcgacagtgttgagcttgtaatatcatgtctcttattgctaaattagttcctttcttaacagaaaccttcaaagtttttgtttttgttttcatttacctaatgtacacatacgctggccatgactaacaacatgtccaggcttagagcatatttttttctagcttaaattgttaacttgtcattcagtaaaatccgagaattgtgaagctctaattgaagctaattcgttttataaagtcagttaaaaagtatactaaattatccaacttttcttcaaaatctcaaaattctatgacaaaacgatagtctttgtttatgtcagtaccacaaagaggtggaaaaaaacaccaaaaaaacaataagcaaactatacactgagaagaaaaataaaagagagctcaatagatgttttatactaacggtagattagatcaaagatccaagctttactctacatagagcagaacccagaatcccttcatatctcttttattctagcaccgataatctactgaaaagaagacacttagagctctgtctctttgtcaaagaagtcccagccgtcatccagaagctccttacgttcattaacagaggccgcaattggatcgggtttacttattttgtgggtatctatacttttattagatttttaatcaggctcctgatttctttttatttcgattgaattcctgaacttgtattattcagtagatcgaataaattataaaaagataaaatcataaaataatattttatcctatcaatcatattaaagcaatgaatatgtaaaattaatcttatctttattttaaaaaatcatataggtttagtatttttttaaaaataaagataggattagttttactattcactgcttattacttttaaaaaaatcataaaggtttagtatttttttaaaataaatataggaatagttttactattcactgctttaatagaaaaatagtttaaaatttaagatagttttaatcccagcatttgccacgtttgaacgtgagccgaaacgatgtcgttacattatcttaacctagctgaaacgatgtcgtcataatatcgccaaatgccaactggactacgtcgaacccacaaatcccacaaagcgcgtgaaatcaaatcgctcaaaccacaaaaaagaacaacgcgtttgttacacgctcaatcccacgcgagtagagcacagtaaccttcaaataagcgaatggggcataatcagaaatccgaaataaacctaggggcattatcggaaatgaaaagtagctcactcaatataaaaatctaggaaccctagttttcgttatcactctgtgctccctcgctctatttctcagtctctgtgtttgcggctgaggattccgaacgagtgaccttcttcgtttctcgcaaaggtaacagcctctgctcttgtctcttcgattcgatctatgcctgtctcttatttacgatgatgtttcttcggttatgtttttttatttatgctttatgctgttgatgttcggttgtttgtttcgctttgtttttgtggttcagttttttaggattcttttggtttttgaatcgattaatcggaagagattttcgagttatttggtgtgttggaggtgaatcttttttttgaggtcatagatctgttgtatttgtgttataaacatgcgactttgtatgattttttacgaggttatgatgttctggttgttttattatgaatctgttgagacagaaccatgatttttgttgatgttcgtttacactattaaaggtttgttttaacaggattaaaagttttttaagcatgttgaaggagtcttgtagatatgtaaccgtcgatagtttttttgtgggtttgttcacatgttatcaagcttaatcttttactatgtatgcgaccatatctggatccagcaaaggcgattttttaattccttgtgaaacttttgtaatatgaagttgaaattttgttattggtaaactataaatgtgtgaagttggagtatacctttaccttcttatttggctttgtgatagtttaatttatatgtattttgagttctgacttgtatttctttgaattgattctagtttaagtaatcatggcctcctccgagaacgtcatcaccgagttcatgcgcttcaaggtgcgcatggagggcaccgtgaacggccacgagttcgagatcgagggcgagggcgagggccgcccctacgagggccacaacaccgtgaagctgaaggtgacgaagggcggccccctgcccttcgcctgggacatcctgtccccccagttccagtacggctccaaggtgtacgtgaagcaccccgccgacatccccgactacaagaagctgtccttccccgagggcttcaagtgggagcgcgtgatgaacttcgaggacggcggcgtggcgaccgtgacccaggactcctccctgcaggacggctgcttcatctacaaggtgaagttcatcggcgtgaacttcccctccgacggccccgtgatgcagaagaagaccatgggctgggaggcctccaccgagcgcctgtacccccgcgacggcgtgctgaagggcgagacccacaaggccctgaagctgaaggacggcggccactacctggtggagttcaagtccatctacatggccaagaagcccgtgcagctgcccggctactactacgtggacgccaagctggacatcacctcccacaacgaggactacaccatcgtggagcagtacgagcgcaccgagggccgccaccacctgttcctgtagttttgtgatctgatgataagtggttggttcgtgtctcatgcacttgggaggtgatctatttcacctggtgtagtttgtgtttccgtcagttggaaaaacttatccctatcgatttcgttttcattttctgcttttcttttatgtaccttcgtttgggcttgtaacgggcctttgtatttcaactctcaataataatccaagtgcatgttaaacaatttgtcatctgtttcggctttgatatactactggtgaagatgggccgtactactgcatcacaacgaaaaataataataagatgaaaaacttgaagtggaaaaaaaaaaaaacttgaatgttcactactactcattgaccataatgtttaacatacatagctcaatagtatttttgtgaatatggcaacacaaacagtccaaaacaattgtctcttactataccaaaccaagggcgccgcttgtttgccactctttgtgtgcaatagtgtgattaccacatctccacattcaatatattccctgaattatctgacgattttgatggctcactgttttcccaagtcttgaattgtcttctgtgcgccagtcaaatgcatatgtgttgagtttatcttttaaatatcaagcttttgtttttaacttttgtttgtaaccaaaaactcacagtaggagtttgatcacataattttatgtttgcctttgcaatttctagtgagtctttgattaaaagcttgaaaagaaaatgcagccaagcttaccaagtaagttatgtgtattaaccagaggaagagagaatcttgcaaaatttcaacaaacacaaaaagaagtattactacgattggtggagaaagaaaacgattccaaatcttgaactgttgttgtaaaagcatagcagaaagtgggagacaaccgaaatagaaatgactataacttaatttaatgttatcattataatttcttctagcaaatatttagaaagtaaatatcacatcaacctttaatgtaattaagctttctctttttgattcatgtgagatgaaaagaaaaaaaagaagagaaaagtgtagaaaacacatcatttctaagctgaagctgaggtacaaattaattaataagtgactagggtcacgtgaccctagtcacttatgattccgatgacttcgtaggttcctagctcaagccgctcgtgtccaagcgtcacttacgattagctaatgattacggcatctaggaccgactagttcttatgtgcttctagtctccaaatgtggttgatagttattttgctctaagatcaacagtaatgaagtataaatcatcgttgtggtgtgctactcggttaattgagcattaacacacacaaacatgacgaggatggtataatctccaaaaatgtgtactttgttaggtgggaccctatagccttgattaatgtgctatgttaggcatgcctggaaacgtgtgacgcatatgttttgtgaacctgttgatattatatgtgcttttatattaccatattttattaaaatactaatatttattactagtaagatataacattctatctagcttaaaaactaaccataaatattccataataactagatttaccaaactaatatactaaatatacataataaatacaaaattaacaagacaataatcaatatttatgagcttaatatatttagacattatggttggtcgacgataatcatgctaacttttcgtaattgcttgattgaaatatgcttagaataatgcctctttgttctacatggcaaatagggaccattatggtgtaacaccctgggaaccacaaacaccccgaaatgctactaaactacacaactaaccttcatatataaaatttcgacagcatctcctttgaaaatttgcatagacgtggaagcaacagagtataaacagatctagctagctaagtttaaacggccggccaaacgtgcaagcgctactagacaattcagtacattaaaaacgtccgcaatgtgttattaagttgtctaagcgtcaatttatttacaattgaatatatcctgcca

SEQ ID NO: 161 - DNA, 15440 bp, Artificial Sequence
  RV026527 T-DNA
aattacaacggtatatatcctgtcagccaacaccaaaacatcaaaaaaatcgggatcaggatcaggatctgcggccgcatcctgcaggtttaaacggccggccttcactagctagctgctaagctcaaacgagcaggaagcaacgagagggtggcgcgcgaccgacgtgcgtacgtagcatgagcctgagtggagacgttggacgtgtatgtatatacctctctgcgtgttaactatgtacgtaagcggcaggcagtgcaataagtgtggctctgtagtatgtacgtgcgggtacgatgctgtaagctactgaggcaagtccataaataaataatgacacgtgcgtgttctataatctcttcgcttcttcatttgtccccttgcggagtttggcatccattgatgccgttacgctgagaacagacacagcagacgaaccaaaagtgagttcttgtatgaaactatgacccttcatcgctaggctcaaacagcaccccgtacgaacacagcaaattagtcatctaactattagcccctacatgtttcagacgatacataaatatagcccatccttagcaattagctattggccctgcccatcccaagcaatgatctcgaagtatttttaatatatagtatttttaatatgtagcttttaaaattagaagataattttgagacaaaaatctccaagtatttttttgggtattttttactgcctccgtttttctttatttctcgtcacctagtttaattttgtgctaatcggctataaacgaaacagagagaaaagttactctaaaagcaactccaacagattagatataaatcttatatcctgcctagagctgttaaaaagatagacaactttagtggattagtgtatgcaacaaactctccaaatttaagtatcccaactacccaacgcatatcgttcccttttcattggcgcacgaactttcacctgctatagccgacgtacatgttcgttttttttgggcggcgcttactttcttccccgttcgttctcagcatcgcaactcaatttgttatggcggagaagcccttgtatcccaggtagtaatgcacagatatgcattattattattcataaaatcgagctagttaccctatgaggtgacatgaagcgctcacggttactatgacggttagcttcacgactgttggtggcagtagcgtacgacttagctatagttccggacttacctaactgactagagtcacacttagctgaccctagtcacttaggcgcgccaagcttggatctcctgcaggatctggccggccggatgggcggatctcgtacctcaactttgtatagaaaagttgggccagaatggcccggaccgggttaccaagcggccgcgaattccagaagaccaaagggcaattgagacttttcaacaaagggtaatatcgggaaacctcctcggattccattgcccagctatctgtcacttcatcaaaaggacagtagaaaaggaaggtggcacctacaaatgccatcattgcgataaaggaaaggctatcgttcaagatgcctctgccgacagtggtcccaaagatggacccccacccacgaggagcatcgtggaaaaagaagacgttccaaccacgtcttcaaagcaagtggattgatgtgatatctccactgacgtaagggatgacgcacaatcccactatccttcgcaagacccttcctctatataaggaagttcatttcatttggagaggacccatggaacatcatcatcagcagcagttccacggtggccagccgcagctgatgagtgaaaatgaagagatgaacaacaatgggagcgggggtgggagtagtaagagcagttttctttgcagacagtcgagcacaaggtggatacccactactgatcagataaggatactgaaggatctatactacaacagtggactgagatccccaaacgccgatcagatccaaagaatatccgccagactgaggcagtacggaaagatcgagggtaagaatgttttctactggtttcaaaatcacaaagcccgagagaggcagaagaagagactcaccgtcgatattgctgcagcggcaactaccaacaaattctccaacaacactaatatgtcttcttcttcttctccctcagggatttctcctgcttctcatgcagtgtatgcaggattagggcagatggggagcaatggcggtggatcagtcgtgatggagagaacttcttacatggagtgttccttgccaggtgggatgccgatgcccgtacctgaacccaatgtgggagtcggagtgggatgggtgagtgttgaaacaggagctactactatgcaacaattctactaccatcaacagagaccaaccacaccctttcctgctcctcatcatcaccaccattactacgacgacggttactattccaataataacaaacttcaagcccatcacctacatatacgcgaggaaaatcaacatccagaagatgacgacgaagaagaagaagaagaagaagaagatgaagagatagaaacacttccattgttcccaatccactcacaggagacacagtcttacttcctggaccaacaacatgcaatccacaatcaagaaagcaataacatggaaacctctttggagctcaccctaaactcctactatgctgcttccagtagcagtactccacatggatcagagcatgattaaggtacctgacatcttatagtctgcaacctctcgtgtctgaattcctatctttatcaagtgttattgcttccacgactataggacagctttcgtcgaaaggttttgctcatgtgatctcgaaggattcatctagtctgatttttcgtgacttgtatcggttttattggattcatccaacatatatcaataaaaaatgagttgtgtttcctttcttcctagttcagttaaaattatttccctcctgcgcttgtgctgtaattgtctgtgtacctgttgtttgtgactgtgttagttcccttggatatgatttcgtatttgatatgtacatggagatagcttagcttcattattggagtatgaagttagtatgacatagtcactctcctggaaaattgacactgcaaaccatatttttattctgaaccacaaatcctagtcagtccgctggcatatgccgtccgtttgctgaatccagaacgtgggtttggagatgtacggctgagatgcctctatgcgaaggggatttcgtggtgaaacgagatgggagtagagcaacgcccgtggaagatgcttcaaacttccacacttttgagcaacgatcggcagtagtaaggtagacgatttcaagatcaaagcatatgaagataaacaacatcaacaacaaaatttgttggggttctatagagagaaacagagctacatacatacactgttttgtatctaccatctgagatgatgaaaagatgaaaaactaaagaatgccccggcgccaacgccaggacacgccgcgcgcgcgtcacccgagccatctcttgacccagccggcgctgtatatttacacacgttgcagcatcgatcaccacctgttcgatcgcgtcgccgtcaccaagcttggcgcgccggtcacccggtccgggcctagaaggccacccggggctcggcgttaggcttttagtccgctaggtggctagaccgaggttaggacgctagttcactaggggcctagtggtgttttaaggatgggcaagtttgtacaaaaaagcaggctggcgccggaaccaattcagtcgagtgcggccgccagtgtgatggatatctcgacccgggtgattgcggttacatcatgtacggaaaaataattctaatccttgatttaaatttgaacttgactatttatttattctttatttcattttgtaaatcattttatgtatctcctggcaagcaattttatccaccttgcaccaacaccttcgggttccataatcaaaccaccttaacttcacaccatgctgtaactcacaccgcccagcatctccaatgtgaaagaagctaaaatttaataaacaatcatacgaagcagtgacaaaataccagatggtattaatgcttcgataaaattaattggaaagtataaaatggtagaaaataataaattataattaatttaagtaagataaaaaataattaaaaactaaaatgttaaaattttaaaaaaattattttaaataatatttaaaaacattaaaaatcattttaaaaaatttatttatagaacaattaaataaatatttcagctaataaaaaacaaaagcttacctagccttagaagacaacttgtccaacaattagatgatacccattgcccttacgttttctttaacatcaattattgtttttgtcaacaagctatcttttagttttattttattggtaaaaaatatgtcgccttcaagttgcatcatttaacacatctcgtcattagaaaaataaaactcttccctaaacgattagtagaaaaaatcattcgataataaataagaaagaaaaattagaaaaaaataacttcattttaaaaaaatcattaaggctatattttttaaatgactaattttatatagactgtaactaaaagtatacaatttattatgctatgtatcttaaagaattacttataaaaatctacggaagaatatcttacaaagtgaaaaacaaatgagaaagaatttagtgggatgattatgattttatttgaaaattgaaaaaataattattaaagactttagtggagtaagaaagctttcctattagtcttttcttatccataaaaaaaaaaaaaaaaatctagcgtgacagcttttccatagattttaataatgtaaaatactggtagcagccgaccgttcaggtaatggacactgtggtcctaacttgcaacgggtgcgggcccaatttaataacgccgtggtaacggataaagccaagcgtgaagcggtgaaggtacatctctgactccgtcaagattacgaaaccgtcaactacgaaggactccccgaaatatcatctgtgtcataaacaccaagtcacaccatacatgggcacgcgtcacaatatgattggagaacggttccaccgcatatgctataaaatgcccccacacccctcgaccctaatcgcacttcaattgcaatcaaattagttcattctctttgcgcagttccctacctctcctttcaaggttcgtagatttcttccgtttttttttcttcttctttattgtttgttctacatcagcatgatgttgatttgattgtgttttctatcgtttcatcgattataaattttcataatcagaagattcagcttttattaatgcaagaacgtccttaattgatgattttataaccgtaaattaggtctaattagagtttttttcataaagattttcagatccgtttacaacaagccttaattgttgattctgtagtcgtagattaaggtttttttcatgaactacttcagatccgttaaacaacagccttatttgttgatacttcagtcgtttttcaagaaattgttcagatccgttgataaaagccttattcgttgattctgtatggtatttcaagagatattgctcaggtcctttagcaactaccttatttgttgattctgtggccatagattaggattttttttcacgaaattgcttcttgaaattacgtgatggattttgattctgatttatcttgtgattgttgactctacagccatggcccacagcaagcacggcctgaaggaggagatgaccatgaagtaccacatggagggctgcgtgaacggccacaagttcgtgatcaccggcgagggcatcggctaccccttcaagggcaagcagaccatcaacctgtgcgtgatcgagggcggccccctgcccttcagcgaggacatcctgagcgccggcttcaagtacggcgaccggatcttcaccgagtacccccaggacatcgtggactacttcaagaacagctgccccgccggctacacctggggccggagcttcctgttcgaggacggcgccgtgtgcatctgtaacgtggacatcaccgtgagcgtgaaggagaactgcatctaccacaagagcatcttcaacggcgtgaacttccccgccgacggccccgtgatgaagaagatgaccaccaactgggaggccagctgcgagaagatcatgcccgtgcctaagcagggcatcctgaagggcgacgtgagcatgtacctgctgctgaaggacggcggccggtaccggtgccagttcgacaccgtgtacaaggccaagagcgtgcccagcaagatgcccgagtggcacttcatccagcacaagctgctgcgggaggaccggagcgacgccaagaaccagaagtggcagctgaccgagcacgccatcgccttccccagcgccctggcctgagagctcgaatttccccgatcgttcaaacatttggcaataaagtttcttaagattgaatcctgttgccggtcttgcgatgattatcatataatttctgttgaattacgttaagcatgtaataattaacatgtaatgcatgacgttatttatgagatgggtttttatgattagagtcccgcaattatacatttaatacgcgatagaaaacaaaatatagcgcgcaaactaggataaattatcgcgcgcggtgtcatctatgttactagatcgggaattctagtggccggcccagctgatatctagacccagctttcttgtacaaagtggccgttaacggatcggccagaatggcccggaccgggttaccgaattcgagctcggtaccctgggatccgatatcgatgggccctggccgaagcttggtcacccggtccgggcctagaaggccagcttcggccgccccgggcaactttattatacaaagttgatggtacggatccgtcgacggcgcgccgcggacctgaattccagcacactggcggccgttagtctaaaaacggcccctaactaacgcttagttgcccgctagattagtcccccgttagtgcctagttagacacacgacgaactaggggctactagtaacggccgccagtgtgctcggtacggccagaatggccatctggattcagcagggggtgattgcggttacatcatgtacggaaaaataattctaatccttgatttaaatttgaacttgactatttatttattctttatttcattttgtaaatcattttatgtatctcctggcaagcaattttatccaccttgcaccaacaccttcgggttccataatcaaaccaccttaacttcacaccatgctgtaactcacaccgcccagcatctccaatgtgaaagaagctaaaatttaataaacaatcatacgaagcagtgacaaaataccagatggtattaatgcttcgataaaattaattggaaagtataaaatggtagaaaataataaattataattaatttaagtaagataaaaaataattaaaaactaaaatgttaaaattttaaaaaaattattttaaataatatttaaaaacattaaaaatcattttaaaaaatttatttatagaacaattaaataaatatttcagctaataaaaaacaaaagcttacctagccttagaagacaacttgtccaacaattagatgatacccattgcccttacgttttctttaacatcaattattgtttttgtcaacaagctatcttttagttttattttattggtaaaaaatatgtcgccttcaagttgcatcatttaacacatctcgtcattagaaaaataaaactcttccctaaacgattagtagaaaaaatcattcgataataaataagaaagaaaaattagaaaaaaataacttcattttaaaaaaatcattaaggctatattttttaaatgactaattttatatagactgtaactaaaagtatacaatttattatgctatgtatcttaaagaattacttataaaaatctacggaagaatatcttacaaagtgaaaaacaaatgagaaagaatttagtgggatgattatgattttatttgaaaattgaaaaaataattattaaagactttagtggagtaagaaagctttcctattagtcttttcttatccataaaaaaaaaaaaaaaaatctagcgtgacagcttttccatagattttaataatgtaaaatactggtagcagccgaccgttcaggtaatggacactgtggtcctaacttgcaacgggtgcgggcccaatttaataacgccgtggtaacggataaagccaagcgtgaagcggtgaaggtacatctctgactccgtcaagattacgaaaccgtcaactacgaaggactccccgaaatatcatctgtgtcataaacaccaagtcacaccatacatgggcacgcgtcacaatatgattggagaacggttccaccgcatatgctataaaatgcccccacacccctcgaccctaatcgcacttcaattgcaatcaaattagttcattctctttgcgcagttccctacctctcctttcaaggttcgtagatttcttccgtttttttttcttcttctttattgtttgttctacatcagcatgatgttgatttgattgtgttttctatcgtttcatcgattataaattttcataatcagaagattcagcttttattaatgcaagaacgtccttaattgatgattttataaccgtaaattaggtctaattagagtttttttcataaagattttcagatccgtttacaacaagccttaattgttgattctgtagtcgtagattaaggtttttttcatgaactacttcagatccgttaaacaacagccttatttgttgatacttcagtcgtttttcaagaaattgttcagatccgttgataaaagccttattcgttgattctgtatggtatttcaagagatattgctcaggtcctttagcaactaccttatttgttgattctgtggccatagattaggattttttttcacgaaattgcttcttgaaattacgtgatggattttgattctgatttatcttgtgattgttgactctacagccatggctgcaactactcttacatctgctttacctggtgctttcagttcatcccagagaccaagtgctcctttcaacttacaaagatcacctagagtgcttagaaggttcaacagaaagacaggacgtcaacctcgtggacttgttcgtgctgcaaaggctcaagcggcgcaaaacctgccagagaaattcgatgaaacaagactctgggaggccctcaggggatttggggttagtccaagtagggttacttacgctcccgtcggattcggagattaccactggaccgtcacagatgaagacgggagaccttggttcgcaactgtcagtgacctcgaacacaaagagcattgcgggcagggagcacaagcagcccttaaaggactcagacaagctatggacactgccctcgcacttagagatagggacggactcagattcgtggttgctccagtggcagcaacagatgggggtggccctgtccttccccttgacgctaggtatgcactcacagtcttccctcacgtcccaggaagaacaggagagttcggacaaagactcacagaggcagagagggacagactgcttgctcttctggcagaactccacggaagaacacctcctgaaacaaccccaccagccgatatggaaccaccaggacttcctggtgttagagcagcactcgccgaaagtgaaggaccttggagtggaggaccatttgcagaacccgctagacttcttctcagagaacacgaggccacactgcacgcaagactcgctgaattcgaagccctcgtcgcaagagttaagggtcgtggagcacctcttgtcgttacccacggagaaccacacccaggcaacttgatcctcggagaggaaggctatctcctcgtggactgggatacagttggactggctccagctgaaagggatttgagtctcatctcagacgacccagctgacctcgcaagatacgcagagcttacaggaagaactccagacccagacgcactcgcactctatagactgcgttggagtctccttgatgtggctgagttcgtcgagtggttcagggctgaacaccaaagaacccaagacaccgagagtgcatggaaggggttcactgacacacttgggcaattggctgctggtggatcagctgcatagcaaacttatctctgttatgaatcagaagaagttcatgtctcgtttcatttaaaactttggtggtttgtgttttggggccttgtaaagcccctgatgaataattgttcaactatgtttccgttcctgtgttatacctttctttctaatgagtaatgacatcaaacttcttctgtattgaaattatgtccttgtgagtctctttatcatcgtttcgtctttacattatatgtgctacttttgtctaatgagcctgaaaagtggctccaatggtacgcactggaagatttgttggcttctggtagatatagcgacagtgttgagcttgtaatatcatgtctcttattgctaaattagttcctttcttaacagaaaccttcaaagtttttgtttttgttttcatttacctaatgtacacatacgctggccatgactaacaacatgtccaggcttagagcatatttttttctagcttaaattgttaacttgtcattcagtaaaatccgagaattgtgaagctctaattgaagctaattcgttttataaagtcagttaaaaagtatactaaattatccaacttttcttcaaaatctcaaaattctatgacaaaacgatagtctttgtttatgtcagtaccacaaagaggtggaaaaaaacaccaaaaaaacaataagcaaactatacactgagaagaaaaataaaagagagctcaatagatgttttatactaacggtagattagatcaaagatccaagctttactctacatagagcagaacccagaatcccttcatatctcttttattctagcaccgataatctactgaaaagaagacacttagagctctgtctctttgtcaaagaagtcccagccgtcatccagaagctccttacgttcattaacagaggccgcaattggatcgggtttacttattttgtgggtatctatacttttattagatttttaatcaggctcctgatttctttttatttcgattgaattcctgaacttgtattattcagtagatcgaataaattataaaaagataaaatcataaaataatattttatcctatcaatcatattaaagcaatgaatatgtaaaattaatcttatctttattttaaaaaatcatataggtttagtatttttttaaaaataaagataggattagttttactattcactgcttattacttttaaaaaaatcataaaggtttagtatttttttaaaataaatataggaatagttttactattcactgctttaatagaaaaatagtttaaaatttaagatagttttaatcccagcatttgccacgtttgaacgtgagccgaaacgatgtcgttacattatcttaacctagctgaaacgatgtcgtcataatatcgccaaatgccaactggactacgtcgaacccacaaatcccacaaagcgcgtgaaatcaaatcgctcaaaccacaaaaaagaacaacgcgtttgttacacgctcaatcccacgcgagtagagcacagtaaccttcaaataagcgaatggggcataatcagaaatccgaaataaacctaggggcattatcggaaatgaaaagtagctcactcaatataaaaatctaggaaccctagttttcgttatcactctgtgctccctcgctctatttctcagtctctgtgtttgcggctgaggattccgaacgagtgaccttcttcgtttctcgcaaaggtaacagcctctgctcttgtctcttcgattcgatctatgcctgtctcttatttacgatgatgtttcttcggttatgtttttttatttatgctttatgctgttgatgttcggttgtttgtttcgctttgtttttgtggttcagttttttaggattcttttggtttttgaatcgattaatcggaagagattttcgagttatttggtgtgttggaggtgaatcttttttttgaggtcatagatctgttgtatttgtgttataaacatgcgactttgtatgattttttacgaggttatgatgttctggttgttttattatgaatctgttgagacagaaccatgatttttgttgatgttcgtttacactattaaaggtttgttttaacaggattaaaagttttttaagcatgttgaaggagtcttgtagatatgtaaccgtcgatagtttttttgtgggtttgttcacatgttatcaagcttaatcttttactatgtatgcgaccatatctggatccagcaaaggcgattttttaattccttgtgaaacttttgtaatatgaagttgaaattttgttattggtaaactataaatgtgtgaagttggagtatacctttaccttcttatttggctttgtgatagtttaatttatatgtattttgagttctgacttgtatttctttgaattgattctagtttaagtaatcatggcctcctccgagaacgtcatcaccgagttcatgcgcttcaaggtgcgcatggagggcaccgtgaacggccacgagttcgagatcgagggcgagggcgagggccgcccctacgagggccacaacaccgtgaagctgaaggtgacgaagggcggccccctgcccttcgcctgggacatcctgtccccccagttccagtacggctccaaggtgtacgtgaagcaccccgccgacatccccgactacaagaagctgtccttccccgagggcttcaagtgggagcgcgtgatgaacttcgaggacggcggcgtggcgaccgtgacccaggactcctccctgcaggacggctgcttcatctacaaggtgaagttcatcggcgtgaacttcccctccgacggccccgtgatgcagaagaagaccatgggctgggaggcctccaccgagcgcctgtacccccgcgacggcgtgctgaagggcgagacccacaaggccctgaagctgaaggacggcggccactacctggtggagttcaagtccatctacatggccaagaagcccgtgcagctgcccggctactactacgtggacgccaagctggacatcacctcccacaacgaggactacaccatcgtggagcagtacgagcgcaccgagggccgccaccacctgttcctgtagttttgtgatctgatgataagtggttggttcgtgtctcatgcacttgggaggtgatctatttcacctggtgtagtttgtgtttccgtcagttggaaaaacttatccctatcgatttcgttttcattttctgcttttcttttatgtaccttcgtttgggcttgtaacgggcctttgtatttcaactctcaataataatccaagtgcatgttaaacaatttgtcatctgtttcggctttgatatactactggtgaagatgggccgtactactgcatcacaacgaaaaataataataagatgaaaaacttgaagtggaaaaaaaaaaaaacttgaatgttcactactactcattgaccataatgtttaacatacatagctcaatagtatttttgtgaatatggcaacacaaacagtccaaaacaattgtctcttactataccaaaccaagggcgccgcttgtttgccactctttgtgtgcaatagtgtgattaccacatctccacattcaatatattccctgaattatctgacgattttgatggctcactgttttcccaagtcttgaattgtcttctgtgcgccagtcaaatgcatatgtgttgagtttatcttttaaatatcaagcttttgtttttaacttttgtttgtaaccaaaaactcacagtaggagtttgatcacataattttatgtttgcctttgcaatttctagtgagtctttgattaaaagcttgaaaagaaaatgcagccaagcttaccaagtaagttatgtgtattaaccagaggaagagagaatcttgcaaaatttcaacaaacacaaaaagaagtattactacgattggtggagaaagaaaacgattccaaatcttgaactgttgttgtaaaagcatagcagaaagtgggagacaaccgaaatagaaatgactataacttaatttaatgttatcattataatttcttctagcaaatatttagaaagtaaatatcacatcaacctttaatgtaattaagctttctctttttgattcatgtgagatgaaaagaaaaaaaagaagagaaaagtgtagaaaacacatcatttctaagctgaagctgaggtacaaattaattaataagtgactagggtcacgtgaccctagtcacttatgattccgatgacttcgtaggttcctagctcaagccgctcgtgtccaagcgtcacttacgattagctaatgattacggcatctaggaccgactagttcttatgtgcttctagtctccaaatgtggttgatagttattttgctctaagatcaacagtaatgaagtataaatcatcgttgtggtgtgctactcggttaattgagcattaacacacacaaacatgacgaggatggtataatctccaaaaatgtgtactttgttaggtgggaccctatagccttgattaatgtgctatgttaggcatgcctggaaacgtgtgacgcatatgttttgtgaacctgttgatattatatgtgcttttatattaccatattttattaaaatactaatatttattactagtaagatataacattctatctagcttaaaaactaaccataaatattccataataactagatttaccaaactaatatactaaatatacataataaatacaaaattaacaagacaataatcaatatttatgagcttaatatatttagacattatggttggtcgacgataatcatgctaacttttcgtaattgcttgattgaaatatgcttagaataatgcctctttgttctacatggcaaatagggaccattatggtgtaacaccctgggaaccacaaacaccccgaaatgctactaaactacacaactaaccttcatatataaaatttcgacagcatctcctttgaaaatttgcatagacgtggaagcaacagagtataaacagatctagctagctaagtttaaacggccggccaaacgtgcaagcgctactagacaattcagtacattaaaaacgtccgcaatgtgttattaagttgtctaagcgtcaatttatttacaattgaatatatcctgcca

SEQ ID NO: 162 - DNA, 15202 bp, Artificial Sequence
  RV026529 T-DNA
caaacaaacatacacagcgatttattcacacgaacccgaattacaacggtatatatcctgtcagccaacaccaaaacatcaaaaaaatcgggatcaggatcaggatctgcggccgcatcctgcaggtttaaacggccggccttcactagctagctgctaagctcaaacgagcaggaagcaacgagagggtggcgcgcgaccgacgtgcgtacgtagcatgagcctgagtggagacgttggacgtgtatgtatatacctctctgcgtgttaactatgtacgtaagcggcaggcagtgcaataagtgtggctctgtagtatgtacgtgcgggtacgatgctgtaagctactgaggcaagtccataaataaataatgacacgtgcgtgttctataatctcttcgcttcttcatttgtccccttgcggagtttggcatccattgatgccgttacgctgagaacagacacagcagacgaaccaaaagtgagttcttgtatgaaactatgacccttcatcgctaggctcaaacagcaccccgtacgaacacagcaaattagtcatctaactattagcccctacatgtttcagacgatacataaatatagcccatccttagcaattagctattggccctgcccatcccaagcaatgatctcgaagtatttttaatatatagtatttttaatatgtagcttttaaaattagaagataattttgagacaaaaatctccaagtatttttttgggtattttttactgcctccgtttttctttatttctcgtcacctagtttaattttgtgctaatcggctataaacgaaacagagagaaaagttactctaaaagcaactccaacagattagatataaatcttatatcctgcctagagctgttaaaaagatagacaactttagtggattagtgtatgcaacaaactctccaaatttaagtatcccaactacccaacgcatatcgttcccttttcattggcgcacgaactttcacctgctatagccgacgtacatgttcgttttttttgggcggcgcttactttcttccccgttcgttctcagcatcgcaactcaatttgttatggcggagaagcccttgtatcccaggtagtaatgcacagatatgcattattattattcataaaatcgagctagttaccctatgaggtgacatgaagcgctcacggttactatgacggttagcttcacgactgttggtggcagtagcgtacgacttagctatagttccggacttacctaactgactagagtcacacttagctgaccctagtcacttaggcgcgccaagcttggatctcctgcaggatctggccggccggatgggcggatctcgtacctcaactttgtatagaaaagttgggccagaatggcccggaccgggttaccaagcggccgcgaattccagaagaccaaagggcaattgagacttttcaacaaagggtaatatcgggaaacctcctcggattccattgcccagctatctgtcacttcatcaaaaggacagtagaaaaggaaggtggcacctacaaatgccatcattgcgataaaggaaaggctatcgttcaagatgcctctgccgacagtggtcccaaagatggacccccacccacgaggagcatcgtggaaaaagaagacgttccaaccacgtcttcaaagcaagtggattgatgtgatatctccactgacgtaagggatgacgcacaatcccactatccttcgcaagacccttcctctatataaggaagttcatttcatttggagaggacccatggatcattctgataactgcccaggtaacaacaacaactctggttctggttctggttctggaaccaagtctggttacatgtgcagacaatctaactctagatggatcccaaccgctgaacaaatcagaatccttagagaactttactactctaacggtgttagatctccaaccgctgaacaaatccaaagaatctctgctagacttagacaatacggtaagatcgaaggtaagaacgttttttactggtttcaaaaccataaggctagagaaagacaaaagaagagacttaccgttgatcttgctgttcaaagagctgctgctacctctggtggtcttccaccaggtgttcttaacgtttctcatatcgctggttctacctgcggttctgttcttatggaatcttctcttatggattgctgctctacctctgctcttgaaaaccataacggtagaaaggaaagagctaacggtgatatgatcgttgaaagagaaagatctgctccaggtaaggaaacccttcaactttttccaatgcatcattctccacaaaacgatgataccatcgctgatgattacttttttaacgatgaagaagaaaagccagtttgcatggcttctcttgaacttacccttaactcttttgatagagtttaccatccagattctgattttagatctcattcttcttaaggtacctgacatcttatagtctgcaacctctcgtgtctgaattcctatctttatcaagtgttattgcttccacgactataggacagctttcgtcgaaaggttttgctcatgtgatctcgaaggattcatctagtctgatttttcgtgacttgtatcggttttattggattcatccaacatatatcaataaaaaatgagttgtgtttcctttcttcctagttcagttaaaattatttccctcctgcgcttgtgctgtaattgtctgtgtacctgttgtttgtgactgtgttagttcccttggatatgatttcgtatttgatatgtacatggagatagcttagcttcattattggagtatgaagttagtatgacatagtcactctcctggaaaattgacactgcaaaccatatttttattctgaaccacaaatcctagtcagtccgctggcatatgccgtccgtttgctgaatccagaacgtgggtttggagatgtacggctgagatgcctctatgcgaaggggatttcgtggtgaaacgagatgggagtagagcaacgcccgtggaagatgcttcaaacttccacacttttgagcaacgatcggcagtagtaaggtagacgatttcaagatcaaagcatatgaagataaacaacatcaacaacaaaatttgttggggttctatagagagaaacagagctacatacatacactgttttgtatctaccatctgagatgatgaaaagatgaaaaactaaagaatgccccggcgccaacgccaggacacgccgcgcgcgcgtcacccgagccatctcttgacccagccggcgctgtatatttacacacgttgcagcatcgatcaccacctgttcgatcgcgtcgccgtcaccaagcttggcgcgccggtcacccggtccgggcctagaaggccacccggggctcggcgttaggcttttagtccgctaggtggctagaccgaggttaggacgctagttcactaggggcctagtggtgttttaaggatgggcaagtttgtacaaaaaagcaggctggcgccggaaccaattcagtcgagtgcggccgccagtgtgatggatatctcgacccgggtgattgcggttacatcatgtacggaaaaataattctaatccttgatttaaatttgaacttgactatttatttattctttatttcattttgtaaatcattttatgtatctcctggcaagcaattttatccaccttgcaccaacaccttcgggttccataatcaaaccaccttaacttcacaccatgctgtaactcacaccgcccagcatctccaatgtgaaagaagctaaaatttaataaacaatcatacgaagcagtgacaaaataccagatggtattaatgcttcgataaaattaattggaaagtataaaatggtagaaaataataaattataattaatttaagtaagataaaaaataattaaaaactaaaatgttaaaattttaaaaaaattattttaaataatatttaaaaacattaaaaatcattttaaaaaatttatttatagaacaattaaataaatatttcagctaataaaaaacaaaagcttacctagccttagaagacaacttgtccaacaattagatgatacccattgcccttacgttttctttaacatcaattattgtttttgtcaacaagctatcttttagttttattttattggtaaaaaatatgtcgccttcaagttgcatcatttaacacatctcgtcattagaaaaataaaactcttccctaaacgattagtagaaaaaatcattcgataataaataagaaagaaaaattagaaaaaaataacttcattttaaaaaaatcattaaggctatattttttaaatgactaattttatatagactgtaactaaaagtatacaatttattatgctatgtatcttaaagaattacttataaaaatctacggaagaatatcttacaaagtgaaaaacaaatgagaaagaatttagtgggatgattatgattttatttgaaaattgaaaaaataattattaaagactttagtggagtaagaaagctttcctattagtcttttcttatccataaaaaaaaaaaaaaaaatctagcgtgacagcttttccatagattttaataatgtaaaatactggtagcagccgaccgttcaggtaatggacactgtggtcctaacttgcaacgggtgcgggcccaatttaataacgccgtggtaacggataaagccaagcgtgaagcggtgaaggtacatctctgactccgtcaagattacgaaaccgtcaactacgaaggactccccgaaatatcatctgtgtcataaacaccaagtcacaccatacatgggcacgcgtcacaatatgattggagaacggttccaccgcatatgctataaaatgcccccacacccctcgaccctaatcgcacttcaattgcaatcaaattagttcattctctttgcgcagttccctacctctcctttcaaggttcgtagatttcttccgtttttttttcttcttctttattgtttgttctacatcagcatgatgttgatttgattgtgttttctatcgtttcatcgattataaattttcataatcagaagattcagcttttattaatgcaagaacgtccttaattgatgattttataaccgtaaattaggtctaattagagtttttttcataaagattttcagatccgtttacaacaagccttaattgttgattctgtagtcgtagattaaggtttttttcatgaactacttcagatccgttaaacaacagccttatttgttgatacttcagtcgtttttcaagaaattgttcagatccgttgataaaagccttattcgttgattctgtatggtatttcaagagatattgctcaggtcctttagcaactaccttatttgttgattctgtggccatagattaggattttttttcacgaaattgcttcttgaaattacgtgatggattttgattctgatttatcttgtgattgttgactctacagccatggcccacagcaagcacggcctgaaggaggagatgaccatgaagtaccacatggagggctgcgtgaacggccacaagttcgtgatcaccggcgagggcatcggctaccccttcaagggcaagcagaccatcaacctgtgcgtgatcgagggcggccccctgcccttcagcgaggacatcctgagcgccggcttcaagtacggcgaccggatcttcaccgagtacccccaggacatcgtggactacttcaagaacagctgccccgccggctacacctggggccggagcttcctgttcgaggacggcgccgtgtgcatctgtaacgtggacatcaccgtgagcgtgaaggagaactgcatctaccacaagagcatcttcaacggcgtgaacttccccgccgacggccccgtgatgaagaagatgaccaccaactgggaggccagctgcgagaagatcatgcccgtgcctaagcagggcatcctgaagggcgacgtgagcatgtacctgctgctgaaggacggcggccggtaccggtgccagttcgacaccgtgtacaaggccaagagcgtgcccagcaagatgcccgagtggcacttcatccagcacaagctgctgcgggaggaccggagcgacgccaagaaccagaagtggcagctgaccgagcacgccatcgccttccccagcgccctggcctgagagctcgaatttccccgatcgttcaaacatttggcaataaagtttcttaagattgaatcctgttgccggtcttgcgatgattatcatataatttctgttgaattacgttaagcatgtaataattaacatgtaatgcatgacgttatttatgagatgggtttttatgattagagtcccgcaattatacatttaatacgcgatagaaaacaaaatatagcgcgcaaactaggataaattatcgcgcgcggtgtcatctatgttactagatcgggaattctagtggccggcccagctgatatctagacccagctttcttgtacaaagtggccgttaacggatcggccagaatggcccggaccgggttaccgaattcgagctcggtaccctgggatccgatatcgatgggccctggccgaagcttggtcacccggtccgggcctagaaggccagcttcggccgccccgggcaactttattatacaaagttgatggtacggatccgtcgacggcgcgccgcggacctgaattccagcacactggcggccgttagtctaaaaacggcccctaactaacgcttagttgcccgctagattagtcccccgttagtgcctagttagacacacgacgaactaggggctactagtaacggccgccagtgtgctcggtacggccagaatggccatctggattcagcagggggtgattgcggttacatcatgtacggaaaaataattctaatccttgatttaaatttgaacttgactatttatttattctttatttcattttgtaaatcattttatgtatctcctggcaagcaattttatccaccttgcaccaacaccttcgggttccataatcaaaccaccttaacttcacaccatgctgtaactcacaccgcccagcatctccaatgtgaaagaagctaaaatttaataaacaatcatacgaagcagtgacaaaataccagatggtattaatgcttcgataaaattaattggaaagtataaaatggtagaaaataataaattataattaatttaagtaagataaaaaataattaaaaactaaaatgttaaaattttaaaaaaattattttaaataatatttaaaaacattaaaaatcattttaaaaaatttatttatagaacaattaaataaatatttcagctaataaaaaacaaaagcttacctagccttagaagacaacttgtccaacaattagatgatacccattgcccttacgttttctttaacatcaattattgtttttgtcaacaagctatcttttagttttattttattggtaaaaaatatgtcgccttcaagttgcatcatttaacacatctcgtcattagaaaaataaaactcttccctaaacgattagtagaaaaaatcattcgataataaataagaaagaaaaattagaaaaaaataacttcattttaaaaaaatcattaaggctatattttttaaatgactaattttatatagactgtaactaaaagtatacaatttattatgctatgtatcttaaagaattacttataaaaatctacggaagaatatcttacaaagtgaaaaacaaatgagaaagaatttagtgggatgattatgattttatttgaaaattgaaaaaataattattaaagactttagtggagtaagaaagctttcctattagtcttttcttatccataaaaaaaaaaaaaaaaatctagcgtgacagcttttccatagattttaataatgtaaaatactggtagcagccgaccgttcaggtaatggacactgtggtcctaacttgcaacgggtgcgggcccaatttaataacgccgtggtaacggataaagccaagcgtgaagcggtgaaggtacatctctgactccgtcaagattacgaaaccgtcaactacgaaggactccccgaaatatcatctgtgtcataaacaccaagtcacaccatacatgggcacgcgtcacaatatgattggagaacggttccaccgcatatgctataaaatgcccccacacccctcgaccctaatcgcacttcaattgcaatcaaattagttcattctctttgcgcagttccctacctctcctttcaaggttcgtagatttcttccgtttttttttcttcttctttattgtttgttctacatcagcatgatgttgatttgattgtgttttctatcgtttcatcgattataaattttcataatcagaagattcagcttttattaatgcaagaacgtccttaattgatgattttataaccgtaaattaggtctaattagagtttttttcataaagattttcagatccgtttacaacaagccttaattgttgattctgtagtcgtagattaaggtttttttcatgaactacttcagatccgttaaacaacagccttatttgttgatacttcagtcgtttttcaagaaattgttcagatccgttgataaaagccttattcgttgattctgtatggtatttcaagagatattgctcaggtcctttagcaactaccttatttgttgattctgtggccatagattaggattttttttcacgaaattgcttcttgaaattacgtgatggattttgattctgatttatcttgtgattgttgactctacagccatggctgcaactactcttacatctgctttacctggtgctttcagttcatcccagagaccaagtgctcctttcaacttacaaagatcacctagagtgcttagaaggttcaacagaaagacaggacgtcaacctcgtggacttgttcgtgctgcaaaggctcaagcggcgcaaaacctgccagagaaattcgatgaaacaagactctgggaggccctcaggggatttggggttagtccaagtagggttacttacgctcccgtcggattcggagattaccactggaccgtcacagatgaagacgggagaccttggttcgcaactgtcagtgacctcgaacacaaagagcattgcgggcagggagcacaagcagcccttaaaggactcagacaagctatggacactgccctcgcacttagagatagggacggactcagattcgtggttgctccagtggcagcaacagatgggggtggccctgtccttccccttgacgctaggtatgcactcacagtcttccctcacgtcccaggaagaacaggagagttcggacaaagactcacagaggcagagagggacagactgcttgctcttctggcagaactccacggaagaacacctcctgaaacaaccccaccagccgatatggaaccaccaggacttcctggtgttagagcagcactcgccgaaagtgaaggaccttggagtggaggaccatttgcagaacccgctagacttcttctcagagaacacgaggccacactgcacgcaagactcgctgaattcgaagccctcgtcgcaagagttaagggtcgtggagcacctcttgtcgttacccacggagaaccacacccaggcaacttgatcctcggagaggaaggctatctcctcgtggactgggatacagttggactggctccagctgaaagggatttgagtctcatctcagacgacccagctgacctcgcaagatacgcagagcttacaggaagaactccagacccagacgcactcgcactctatagactgcgttggagtctccttgatgtggctgagttcgtcgagtggttcagggctgaacaccaaagaacccaagacaccgagagtgcatggaaggggttcactgacacacttgggcaattggctgctggtggatcagctgcatagcaaacttatctctgttatgaatcagaagaagttcatgtctcgtttcatttaaaactttggtggtttgtgttttggggccttgtaaagcccctgatgaataattgttcaactatgtttccgttcctgtgttatacctttctttctaatgagtaatgacatcaaacttcttctgtattgaaattatgtccttgtgagtctctttatcatcgtttcgtctttacattatatgtgctacttttgtctaatgagcctgaaaagtggctccaatggtacgcactggaagatttgttggcttctggtagatatagcgacagtgttgagcttgtaatatcatgtctcttattgctaaattagttcctttcttaacagaaaccttcaaagtttttgtttttgttttcatttacctaatgtacacatacgctggccatgactaacaacatgtccaggcttagagcatatttttttctagcttaaattgttaacttgtcattcagtaaaatccgagaattgtgaagctctaattgaagctaattcgttttataaagtcagttaaaaagtatactaaattatccaacttttcttcaaaatctcaaaattctatgacaaaacgatagtctttgtttatgtcagtaccacaaagaggtggaaaaaaacaccaaaaaaacaataagcaaactatacactgagaagaaaaataaaagagagctcaatagatgttttatactaacggtagattagatcaaagatccaagctttactctacatagagcagaacccagaatcccttcatatctcttttattctagcaccgataatctactgaaaagaagacacttagagctctgtctctttgtcaaagaagtcccagccgtcatccagaagctccttacgttcattaacagaggccgcaattggatcgggtttacttattttgtgggtatctatacttttattagatttttaatcaggctcctgatttctttttatttcgattgaattcctgaacttgtattattcagtagatcgaataaattataaaaagataaaatcataaaataatattttatcctatcaatcatattaaagcaatgaatatgtaaaattaatcttatctttattttaaaaaatcatataggtttagtatttttttaaaaataaagataggattagttttactattcactgcttattacttttaaaaaaatcataaaggtttagtatttttttaaaataaatataggaatagttttactattcactgctttaatagaaaaatagtttaaaatttaagatagttttaatcccagcatttgccacgtttgaacgtgagccgaaacgatgtcgttacattatcttaacctagctgaaacgatgtcgtcataatatcgccaaatgccaactggactacgtcgaacccacaaatcccacaaagcgcgtgaaatcaaatcgctcaaaccacaaaaaagaacaacgcgtttgttacacgctcaatcccacgcgagtagagcacagtaaccttcaaataagcgaatggggcataatcagaaatccgaaataaacctaggggcattatcggaaatgaaaagtagctcactcaatataaaaatctaggaaccctagttttcgttatcactctgtgctccctcgctctatttctcagtctctgtgtttgcggctgaggattccgaacgagtgaccttcttcgtttctcgcaaaggtaacagcctctgctcttgtctcttcgattcgatctatgcctgtctcttatttacgatgatgtttcttcggttatgtttttttatttatgctttatgctgttgatgttcggttgtttgtttcgctttgtttttgtggttcagttttttaggattcttttggtttttgaatcgattaatcggaagagattttcgagttatttggtgtgttggaggtgaatcttttttttgaggtcatagatctgttgtatttgtgttataaacatgcgactttgtatgattttttacgaggttatgatgttctggttgttttattatgaatctgttgagacagaaccatgatttttgttgatgttcgtttacactattaaaggtttgttttaacaggattaaaagttttttaagcatgttgaaggagtcttgtagatatgtaaccgtcgatagtttttttgtgggtttgttcacatgttatcaagcttaatcttttactatgtatgcgaccatatctggatccagcaaaggcgattttttaattccttgtgaaacttttgtaatatgaagttgaaattttgttattggtaaactataaatgtgtgaagttggagtatacctttaccttcttatttggctttgtgatagtttaatttatatgtattttgagttctgacttgtatttctttgaattgattctagtttaagtaatcatggcctcctccgagaacgtcatcaccgagttcatgcgcttcaaggtgcgcatggagggcaccgtgaacggccacgagttcgagatcgagggcgagggcgagggccgcccctacgagggccacaacaccgtgaagctgaaggtgacgaagggcggccccctgcccttcgcctgggacatcctgtccccccagttccagtacggctccaaggtgtacgtgaagcaccccgccgacatccccgactacaagaagctgtccttccccgagggcttcaagtgggagcgcgtgatgaacttcgaggacggcggcgtggcgaccgtgacccaggactcctccctgcaggacggctgcttcatctacaaggtgaagttcatcggcgtgaacttcccctccgacggccccgtgatgcagaagaagaccatgggctgggaggcctccaccgagcgcctgtacccccgcgacggcgtgctgaagggcgagacccacaaggccctgaagctgaaggacggcggccactacctggtggagttcaagtccatctacatggccaagaagcccgtgcagctgcccggctactactacgtggacgccaagctggacatcacctcccacaacgaggactacaccatcgtggagcagtacgagcgcaccgagggccgccaccacctgttcctgtagttttgtgatctgatgataagtggttggttcgtgtctcatgcacttgggaggtgatctatttcacctggtgtagtttgtgtttccgtcagttggaaaaacttatccctatcgatttcgttttcattttctgcttttcttttatgtaccttcgtttgggcttgtaacgggcctttgtatttcaactctcaataataatccaagtgcatgttaaacaatttgtcatctgtttcggctttgatatactactggtgaagatgggccgtactactgcatcacaacgaaaaataataataagatgaaaaacttgaagtggaaaaaaaaaaaaacttgaatgttcactactactcattgaccataatgtttaacatacatagctcaatagtatttttgtgaatatggcaacacaaacagtccaaaacaattgtctcttactataccaaaccaagggcgccgcttgtttgccactctttgtgtgcaatagtgtgattaccacatctccacattcaatatattccctgaattatctgacgattttgatggctcactgttttcccaagtcttgaattgtcttctgtgcgccagtcaaatgcatatgtgttgagtttatcttttaaatatcaagcttttgtttttaacttttgtttgtaaccaaaaactcacagtaggagtttgatcacataattttatgtttgcctttgcaatttctagtgagtctttgattaaaagcttgaaaagaaaatgcagccaagcttaccaagtaagttatgtgtattaaccagaggaagagagaatcttgcaaaatttcaacaaacacaaaaagaagtattactacgattggtggagaaagaaaacgattccaaatcttgaactgttgttgtaaaagcatagcagaaagtgggagacaaccgaaatagaaatgactataacttaatttaatgttatcattataatttcttctagcaaatatttagaaagtaaatatcacatcaacctttaatgtaattaagctttctctttttgattcatgtgagatgaaaagaaaaaaaagaagagaaaagtgtagaaaacacatcatttctaagctgaagctgaggtacaaattaattaataagtgactagggtcacgtgaccctagtcacttatgattccgatgacttcgtaggttcctagctcaagccgctcgtgtccaagcgtcacttacgattagctaatgattacggcatctaggaccgactagttcttatgtgcttctagtctccaaatgtggttgatagttattttgctctaagatcaacagtaatgaagtataaatcatcgttgtggtgtgctactcggttaattgagcattaacacacacaaacatgacgaggatggtataatctccaaaaatgtgtactttgttaggtgggaccctatagccttgattaatgtgctatgttaggcatgcctggaaacgtgtgacgcatatgttttgtgaacctgttgatattatatgtgcttttatattaccatattttattaaaatactaatatttattactagtaagatataacattctatctagcttaaaaactaaccataaatattccataataactagatttaccaaactaatatactaaatatacataataaatacaaaattaacaagacaataatcaatatttatgagcttaatatatttagacattatggttggtcgacgataatcatgctaacttttcgtaattgcttgattgaaatatgcttagaataatgcctctttgttctacatggcaaatagggaccattatggtgtaacaccctgggaaccacaaacaccccgaaatgctactaaactacacaactaaccttcatatataaaatttcgacagcatctcctttgaaaatttgcatagacgtggaagcaacagagtataaacagatctagctagctaagtttaaacggccggccaaacgtgcaagcgctactagacaattcagtacattaaaaacgtccgcaatgtgttattaagttgtctaagcgtcaatttatttacaattgaatatatcctgcca

SEQ ID NO: 163 - DNA, 15343 bp, Artificial Sequence
  RV026528 T-DNA
caaacaaacatacacagcgatttattcacacgaacccgaattacaacggtatatatcctgtcagccaacaccaaaacatcaaaaaaatcgggatcaggatcaggatctgcggccgcatcctgcaggtttaaacggccggccttcactagctagctgctaagctcaaacgagcaggaagcaacgagagggtggcgcgcgaccgacgtgcgtacgtagcatgagcctgagtggagacgttggacgtgtatgtatatacctctctgcgtgttaactatgtacgtaagcggcaggcagtgcaataagtgtggctctgtagtatgtacgtgcgggtacgatgctgtaagctactgaggcaagtccataaataaataatgacacgtgcgtgttctataatctcttcgcttcttcatttgtccccttgcggagtttggcatccattgatgccgttacgctgagaacagacacagcagacgaaccaaaagtgagttcttgtatgaaactatgacccttcatcgctaggctcaaacagcaccccgtacgaacacagcaaattagtcatctaactattagcccctacatgtttcagacgatacataaatatagcccatccttagcaattagctattggccctgcccatcccaagcaatgatctcgaagtatttttaatatatagtatttttaatatgtagcttttaaaattagaagataattttgagacaaaaatctccaagtatttttttgggtattttttactgcctccgtttttctttatttctcgtcacctagtttaattttgtgctaatcggctataaacgaaacagagagaaaagttactctaaaagcaactccaacagattagatataaatcttatatcctgcctagagctgttaaaaagatagacaactttagtggattagtgtatgcaacaaactctccaaatttaagtatcccaactacccaacgcatatcgttcccttttcattggcgcacgaactttcacctgctatagccgacgtacatgttcgttttttttgggcggcgcttactttcttccccgttcgttctcagcatcgcaactcaatttgttatggcggagaagcccttgtatcccaggtagtaatgcacagatatgcattattattattcataaaatcgagctagttaccctatgaggtgacatgaagcgctcacggttactatgacggttagcttcacgactgttggtggcagtagcgtacgacttagctatagttccggacttacctaactgactagagtcacacttagctgaccctagtcacttaggcgcgccaagcttggatctcctgcaggatctggccggccggatgggcggatctcgtacctcaactttgtatagaaaagttgggccagaatggcccggaccgggttaccaagcggccgcgaattccagaagaccaaagggcaattgagacttttcaacaaagggtaatatcgggaaacctcctcggattccattgcccagctatctgtcacttcatcaaaaggacagtagaaaaggaaggtggcacctacaaatgccatcattgcgataaaggaaaggctatcgttcaagatgcctctgccgacagtggtcccaaagatggacccccacccacgaggagcatcgtggaaaaagaagacgttccaaccacgtcttcaaagcaagtggattgatgtgatatctccactgacgtaagggatgacgcacaatcccactatccttcgcaagacccttcctctatataaggaagttcatttcatttggagaggacccatggaacctcaacaagatcccaataaccaacaacaacaacttcaacaacaacaacatgaagaaaacagcagtggaagtagtagcaaaagcagttttctttgcaggcaaactagtacaaggtggacacccacaagtgatcagataagaatcttgaaagacctttactacaacaatggagttaggtctccaagtgcagagcaaatacagagaatctcagcaaggttaaggcagtacggtaagattgaaggcaagaatgttttctattggtttcagaaccacaaagctcgtgagagacaaaagaagagattcacaaatgatacaacaaccatgtccatgcaaagagctactactgcaactggtcatgccaaatacattactacttctcctgggatttcatctccatcttctgctggtgtacttggtgttggacagatgggaagcaacatgggatatggatctgttgttatggagaagagttttagagactgttcaatatctcctgctgctggtggtggtggtggtggtggcagtaatatgggtggatatggatccatgaacaacaattttggttggattggtgcgggtgtcgagccatatccatttttcaacaagacaaagcatattcaaaaatatgaagaagaagatttctcccaaactgagattgaaacactaccactatttcccatgcatggtgaagacagtacaaggtttggttcatctggcaacccaaacccgaattggaactggtttcgaacaggagatgaaatgattggatctagaacatcattggagcttagcttgaattcttactctggcgggtcaattaataactgaggtacctgacatcttatagtctgcaacctctcgtgtctgaattcctatctttatcaagtgttattgcttccacgactataggacagctttcgtcgaaaggttttgctcatgtgatctcgaaggattcatctagtctgatttttcgtgacttgtatcggttttattggattcatccaacatatatcaataaaaaatgagttgtgtttcctttcttcctagttcagttaaaattatttccctcctgcgcttgtgctgtaattgtctgtgtacctgttgtttgtgactgtgttagttcccttggatatgatttcgtatttgatatgtacatggagatagcttagcttcattattggagtatgaagttagtatgacatagtcactctcctggaaaattgacactgcaaaccatatttttattctgaaccacaaatcctagtcagtccgctggcatatgccgtccgtttgctgaatccagaacgtgggtttggagatgtacggctgagatgcctctatgcgaaggggatttcgtggtgaaacgagatgggagtagagcaacgcccgtggaagatgcttcaaacttccacacttttgagcaacgatcggcagtagtaaggtagacgatttcaagatcaaagcatatgaagataaacaacatcaacaacaaaatttgttggggttctatagagagaaacagagctacatacatacactgttttgtatctaccatctgagatgatgaaaagatgaaaaactaaagaatgccccggcgccaacgccaggacacgccgcgcgcgcgtcacccgagccatctcttgacccagccggcgctgtatatttacacacgttgcagcatcgatcaccacctgttcgatcgcgtcgccgtcaccaagcttggcgcgccggtcacccggtccgggcctagaaggccacccggggctcggcgttaggcttttagtccgctaggtggctagaccgaggttaggacgctagttcactaggggcctagtggtgttttaaggatgggcaagtttgtacaaaaaagcaggctggcgccggaaccaattcagtcgagtgcggccgccagtgtgatggatatctcgacccgggtgattgcggttacatcatgtacggaaaaataattctaatccttgatttaaatttgaacttgactatttatttattctttatttcattttgtaaatcattttatgtatctcctggcaagcaattttatccaccttgcaccaacaccttcgggttccataatcaaaccaccttaacttcacaccatgctgtaactcacaccgcccagcatctccaatgtgaaagaagctaaaatttaataaacaatcatacgaagcagtgacaaaataccagatggtattaatgcttcgataaaattaattggaaagtataaaatggtagaaaataataaattataattaatttaagtaagataaaaaataattaaaaactaaaatgttaaaattttaaaaaaattattttaaataatatttaaaaacattaaaaatcattttaaaaaatttatttatagaacaattaaataaatatttcagctaataaaaaacaaaagcttacctagccttagaagacaacttgtccaacaattagatgatacccattgcccttacgttttctttaacatcaattattgtttttgtcaacaagctatcttttagttttattttattggtaaaaaatatgtcgccttcaagttgcatcatttaacacatctcgtcattagaaaaataaaactcttccctaaacgattagtagaaaaaatcattcgataataaataagaaagaaaaattagaaaaaaataacttcattttaaaaaaatcattaaggctatattttttaaatgactaattttatatagactgtaactaaaagtatacaatttattatgctatgtatcttaaagaattacttataaaaatctacggaagaatatcttacaaagtgaaaaacaaatgagaaagaatttagtgggatgattatgattttatttgaaaattgaaaaaataattattaaagactttagtggagtaagaaagctttcctattagtcttttcttatccataaaaaaaaaaaaaaaaatctagcgtgacagcttttccatagattttaataatgtaaaatactggtagcagccgaccgttcaggtaatggacactgtggtcctaacttgcaacgggtgcgggcccaatttaataacgccgtggtaacggataaagccaagcgtgaagcggtgaaggtacatctctgactccgtcaagattacgaaaccgtcaactacgaaggactccccgaaatatcatctgtgtcataaacaccaagtcacaccatacatgggcacgcgtcacaatatgattggagaacggttccaccgcatatgctataaaatgcccccacacccctcgaccctaatcgcacttcaattgcaatcaaattagttcattctctttgcgcagttccctacctctcctttcaaggttcgtagatttcttccgtttttttttcttcttctttattgtttgttctacatcagcatgatgttgatttgattgtgttttctatcgtttcatcgattataaattttcataatcagaagattcagcttttattaatgcaagaacgtccttaattgatgattttataaccgtaaattaggtctaattagagtttttttcataaagattttcagatccgtttacaacaagccttaattgttgattctgtagtcgtagattaaggtttttttcatgaactacttcagatccgttaaacaacagccttatttgttgatacttcagtcgtttttcaagaaattgttcagatccgttgataaaagccttattcgttgattctgtatggtatttcaagagatattgctcaggtcctttagcaactaccttatttgttgattctgtggccatagattaggattttttttcacgaaattgcttcttgaaattacgtgatggattttgattctgatttatcttgtgattgttgactctacagccatggcccacagcaagcacggcctgaaggaggagatgaccatgaagtaccacatggagggctgcgtgaacggccacaagttcgtgatcaccggcgagggcatcggctaccccttcaagggcaagcagaccatcaacctgtgcgtgatcgagggcggccccctgcccttcagcgaggacatcctgagcgccggcttcaagtacggcgaccggatcttcaccgagtacccccaggacatcgtggactacttcaagaacagctgccccgccggctacacctggggccggagcttcctgttcgaggacggcgccgtgtgcatctgtaacgtggacatcaccgtgagcgtgaaggagaactgcatctaccacaagagcatcttcaacggcgtgaacttccccgccgacggccccgtgatgaagaagatgaccaccaactgggaggccagctgcgagaagatcatgcccgtgcctaagcagggcatcctgaagggcgacgtgagcatgtacctgctgctgaaggacggcggccggtaccggtgccagttcgacaccgtgtacaaggccaagagcgtgcccagcaagatgcccgagtggcacttcatccagcacaagctgctgcgggaggaccggagcgacgccaagaaccagaagtggcagctgaccgagcacgccatcgccttccccagcgccctggcctgagagctcgaatttccccgatcgttcaaacatttggcaataaagtttcttaagattgaatcctgttgccggtcttgcgatgattatcatataatttctgttgaattacgttaagcatgtaataattaacatgtaatgcatgacgttatttatgagatgggtttttatgattagagtcccgcaattatacatttaatacgcgatagaaaacaaaatatagcgcgcaaactaggataaattatcgcgcgcggtgtcatctatgttactagatcgggaattctagtggccggcccagctgatatctagacccagctttcttgtacaaagtggccgttaacggatcggccagaatggcccggaccgggttaccgaattcgagctcggtaccctgggatccgatatcgatgggccctggccgaagcttggtcacccggtccgggcctagaaggccagcttcggccgccccgggcaactttattatacaaagttgatggtacggatccgtcgacggcgcgccgcggacctgaattccagcacactggcggccgttagtctaaaaacggcccctaactaacgcttagttgcccgctagattagtcccccgttagtgcctagttagacacacgacgaactaggggctactagtaacggccgccagtgtgctcggtacggccagaatggccatctggattcagcagggggtgattgcggttacatcatgtacggaaaaataattctaatccttgatttaaatttgaacttgactatttatttattctttatttcattttgtaaatcattttatgtatctcctggcaagcaattttatccaccttgcaccaacaccttcgggttccataatcaaaccaccttaacttcacaccatgctgtaactcacaccgcccagcatctccaatgtgaaagaagctaaaatttaataaacaatcatacgaagcagtgacaaaataccagatggtattaatgcttcgataaaattaattggaaagtataaaatggtagaaaataataaattataattaatttaagtaagataaaaaataattaaaaactaaaatgttaaaattttaaaaaaattattttaaataatatttaaaaacattaaaaatcattttaaaaaatttatttatagaacaattaaataaatatttcagctaataaaaaacaaaagcttacctagccttagaagacaacttgtccaacaattagatgatacccattgcccttacgttttctttaacatcaattattgtttttgtcaacaagctatcttttagttttattttattggtaaaaaatatgtcgccttcaagttgcatcatttaacacatctcgtcattagaaaaataaaactcttccctaaacgattagtagaaaaaatcattcgataataaataagaaagaaaaattagaaaaaaataacttcattttaaaaaaatcattaaggctatattttttaaatgactaattttatatagactgtaactaaaagtatacaatttattatgctatgtatcttaaagaattacttataaaaatctacggaagaatatcttacaaagtgaaaaacaaatgagaaagaatttagtgggatgattatgattttatttgaaaattgaaaaaataattattaaagactttagtggagtaagaaagctttcctattagtcttttcttatccataaaaaaaaaaaaaaaaatctagcgtgacagcttttccatagattttaataatgtaaaatactggtagcagccgaccgttcaggtaatggacactgtggtcctaacttgcaacgggtgcgggcccaatttaataacgccgtggtaacggataaagccaagcgtgaagcggtgaaggtacatctctgactccgtcaagattacgaaaccgtcaactacgaaggactccccgaaatatcatctgtgtcataaacaccaagtcacaccatacatgggcacgcgtcacaatatgattggagaacggttccaccgcatatgctataaaatgcccccacacccctcgaccctaatcgcacttcaattgcaatcaaattagttcattctctttgcgcagttccctacctctcctttcaaggttcgtagatttcttccgtttttttttcttcttctttattgtttgttctacatcagcatgatgttgatttgattgtgttttctatcgtttcatcgattataaattttcataatcagaagattcagcttttattaatgcaagaacgtccttaattgatgattttataaccgtaaattaggtctaattagagtttttttcataaagattttcagatccgtttacaacaagccttaattgttgattctgtagtcgtagattaaggtttttttcatgaactacttcagatccgttaaacaacagccttatttgttgatacttcagtcgtttttcaagaaattgttcagatccgttgataaaagccttattcgttgattctgtatggtatttcaagagatattgctcaggtcctttagcaactaccttatttgttgattctgtggccatagattaggattttttttcacgaaattgcttcttgaaattacgtgatggattttgattctgatttatcttgtgattgttgactctacagccatggctgcaactactcttacatctgctttacctggtgctttcagttcatcccagagaccaagtgctcctttcaacttacaaagatcacctagagtgcttagaaggttcaacagaaagacaggacgtcaacctcgtggacttgttcgtgctgcaaaggctcaagcggcgcaaaacctgccagagaaattcgatgaaacaagactctgggaggccctcaggggatttggggttagtccaagtagggttacttacgctcccgtcggattcggagattaccactggaccgtcacagatgaagacgggagaccttggttcgcaactgtcagtgacctcgaacacaaagagcattgcgggcagggagcacaagcagcccttaaaggactcagacaagctatggacactgccctcgcacttagagatagggacggactcagattcgtggttgctccagtggcagcaacagatgggggtggccctgtccttccccttgacgctaggtatgcactcacagtcttccctcacgtcccaggaagaacaggagagttcggacaaagactcacagaggcagagagggacagactgcttgctcttctggcagaactccacggaagaacacctcctgaaacaaccccaccagccgatatggaaccaccaggacttcctggtgttagagcagcactcgccgaaagtgaaggaccttggagtggaggaccatttgcagaacccgctagacttcttctcagagaacacgaggccacactgcacgcaagactcgctgaattcgaagccctcgtcgcaagagttaagggtcgtggagcacctcttgtcgttacccacggagaaccacacccaggcaacttgatcctcggagaggaaggctatctcctcgtggactgggatacagttggactggctccagctgaaagggatttgagtctcatctcagacgacccagctgacctcgcaagatacgcagagcttacaggaagaactccagacccagacgcactcgcactctatagactgcgttggagtctccttgatgtggctgagttcgtcgagtggttcagggctgaacaccaaagaacccaagacaccgagagtgcatggaaggggttcactgacacacttgggcaattggctgctggtggatcagctgcatagcaaacttatctctgttatgaatcagaagaagttcatgtctcgtttcatttaaaactttggtggtttgtgttttggggccttgtaaagcccctgatgaataattgttcaactatgtttccgttcctgtgttatacctttctttctaatgagtaatgacatcaaacttcttctgtattgaaattatgtccttgtgagtctctttatcatcgtttcgtctttacattatatgtgctacttttgtctaatgagcctgaaaagtggctccaatggtacgcactggaagatttgttggcttctggtagatatagcgacagtgttgagcttgtaatatcatgtctcttattgctaaattagttcctttcttaacagaaaccttcaaagtttttgtttttgttttcatttacctaatgtacacatacgctggccatgactaacaacatgtccaggcttagagcatatttttttctagcttaaattgttaacttgtcattcagtaaaatccgagaattgtgaagctctaattgaagctaattcgttttataaagtcagttaaaaagtatactaaattatccaacttttcttcaaaatctcaaaattctatgacaaaacgatagtctttgtttatgtcagtaccacaaagaggtggaaaaaaacaccaaaaaaacaataagcaaactatacactgagaagaaaaataaaagagagctcaatagatgttttatactaacggtagattagatcaaagatccaagctttactctacatagagcagaacccagaatcccttcatatctcttttattctagcaccgataatctactgaaaagaagacacttagagctctgtctctttgtcaaagaagtcccagccgtcatccagaagctccttacgttcattaacagaggccgcaattggatcgggtttacttattttgtgggtatctatacttttattagatttttaatcaggctcctgatttctttttatttcgattgaattcctgaacttgtattattcagtagatcgaataaattataaaaagataaaatcataaaataatattttatcctatcaatcatattaaagcaatgaatatgtaaaattaatcttatctttattttaaaaaatcatataggtttagtatttttttaaaaataaagataggattagttttactattcactgcttattacttttaaaaaaatcataaaggtttagtatttttttaaaataaatataggaatagttttactattcactgctttaatagaaaaatagtttaaaatttaagatagttttaatcccagcatttgccacgtttgaacgtgagccgaaacgatgtcgttacattatcttaacctagctgaaacgatgtcgtcataatatcgccaaatgccaactggactacgtcgaacccacaaatcccacaaagcgcgtgaaatcaaatcgctcaaaccacaaaaaagaacaacgcgtttgttacacgctcaatcccacgcgagtagagcacagtaaccttcaaataagcgaatggggcataatcagaaatccgaaataaacctaggggcattatcggaaatgaaaagtagctcactcaatataaaaatctaggaaccctagttttcgttatcactctgtgctccctcgctctatttctcagtctctgtgtttgcggctgaggattccgaacgagtgaccttcttcgtttctcgcaaaggtaacagcctctgctcttgtctcttcgattcgatctatgcctgtctcttatttacgatgatgtttcttcggttatgtttttttatttatgctttatgctgttgatgttcggttgtttgtttcgctttgtttttgtggttcagttttttaggattcttttggtttttgaatcgattaatcggaagagattttcgagttatttggtgtgttggaggtgaatcttttttttgaggtcatagatctgttgtatttgtgttataaacatgcgactttgtatgattttttacgaggttatgatgttctggttgttttattatgaatctgttgagacagaaccatgatttttgttgatgttcgtttacactattaaaggtttgttttaacaggattaaaagttttttaagcatgttgaaggagtcttgtagatatgtaaccgtcgatagtttttttgtgggtttgttcacatgttatcaagcttaatcttttactatgtatgcgaccatatctggatccagcaaaggcgattttttaattccttgtgaaacttttgtaatatgaagttgaaattttgttattggtaaactataaatgtgtgaagttggagtatacctttaccttcttatttggctttgtgatagtttaatttatatgtattttgagttctgacttgtatttctttgaattgattctagtttaagtaatcatggcctcctccgagaacgtcatcaccgagttcatgcgcttcaaggtgcgcatggagggcaccgtgaacggccacgagttcgagatcgagggcgagggcgagggccgcccctacgagggccacaacaccgtgaagctgaaggtgacgaagggcggccccctgcccttcgcctgggacatcctgtccccccagttccagtacggctccaaggtgtacgtgaagcaccccgccgacatccccgactacaagaagctgtccttccccgagggcttcaagtgggagcgcgtgatgaacttcgaggacggcggcgtggcgaccgtgacccaggactcctccctgcaggacggctgcttcatctacaaggtgaagttcatcggcgtgaacttcccctccgacggccccgtgatgcagaagaagaccatgggctgggaggcctccaccgagcgcctgtacccccgcgacggcgtgctgaagggcgagacccacaaggccctgaagctgaaggacggcggccactacctggtggagttcaagtccatctacatggccaagaagcccgtgcagctgcccggctactactacgtggacgccaagctggacatcacctcccacaacgaggactacaccatcgtggagcagtacgagcgcaccgagggccgccaccacctgttcctgtagttttgtgatctgatgataagtggttggttcgtgtctcatgcacttgggaggtgatctatttcacctggtgtagtttgtgtttccgtcagttggaaaaacttatccctatcgatttcgttttcattttctgcttttcttttatgtaccttcgtttgggcttgtaacgggcctttgtatttcaactctcaataataatccaagtgcatgttaaacaatttgtcatctgtttcggctttgatatactactggtgaagatgggccgtactactgcatcacaacgaaaaataataataagatgaaaaacttgaagtggaaaaaaaaaaaaacttgaatgttcactactactcattgaccataatgtttaacatacatagctcaatagtatttttgtgaatatggcaacacaaacagtccaaaacaattgtctcttactataccaaaccaagggcgccgcttgtttgccactctttgtgtgcaatagtgtgattaccacatctccacattcaatatattccctgaattatctgacgattttgatggctcactgttttcccaagtcttgaattgtcttctgtgcgccagtcaaatgcatatgtgttgagtttatcttttaaatatcaagcttttgtttttaacttttgtttgtaaccaaaaactcacagtaggagtttgatcacataattttatgtttgcctttgcaatttctagtgagtctttgattaaaagcttgaaaagaaaatgcagccaagcttaccaagtaagttatgtgtattaaccagaggaagagagaatcttgcaaaatttcaacaaacacaaaaagaagtattactacgattggtggagaaagaaaacgattccaaatcttgaactgttgttgtaaaagcatagcagaaagtgggagacaaccgaaatagaaatgactataacttaatttaatgttatcattataatttcttctagcaaatatttagaaagtaaatatcacatcaacctttaatgtaattaagctttctctttttgattcatgtgagatgaaaagaaaaaaaagaagagaaaagtgtagaaaacacatcatttctaagctgaagctgaggtacaaattaattaataagtgactagggtcacgtgaccctagtcacttatgattccgatgacttcgtaggttcctagctcaagccgctcgtgtccaagcgtcacttacgattagctaatgattacggcatctaggaccgactagttcttatgtgcttctagtctccaaatgtggttgatagttattttgctctaagatcaacagtaatgaagtataaatcatcgttgtggtgtgctactcggttaattgagcattaacacacacaaacatgacgaggatggtataatctccaaaaatgtgtactttgttaggtgggaccctatagccttgattaatgtgctatgttaggcatgcctggaaacgtgtgacgcatatgttttgtgaacctgttgatattatatgtgcttttatattaccatattttattaaaatactaatatttattactagtaagatataacattctatctagcttaaaaactaaccataaatattccataataactagatttaccaaactaatatactaaatatacataataaatacaaaattaacaagacaataatcaatatttatgagcttaatatatttagacattatggttggtcgacgataatcatgctaacttttcgtaattgcttgattgaaatatgcttagaataatgcctctttgttctacatggcaaatagggaccattatggtgtaacaccctgggaaccacaaacaccccgaaatgctactaaactacacaactaaccttcatatataaaatttcgacagcatctcctttgaaaatttgcatagacgtggaagcaacagagtataaacagatctagctagctaagtttaaacggccggccaaacgtgcaagcgctactagacaattcagtacattaaaaacgtccgcaatgtgttattaagttgtctaagcgtcaatttatttacaattgaatatatcctgcca

SEQ ID NO: 164 - DNA, 15303 bp, Artificial Sequence
  RV026520 T-DNA
caaacaaacatacacagcgatttattcacacgaacccgaattacaacggtatatatcctgtcagccaacaccaaaacatcaaaaaaatcgggatcaggatcaggatctgcggccgcatcctgcaggtttaaacggccggccttcactagctagctgctaagctcaaacgagcaggaagcaacgagagggtggcgcgcgaccgacgtgcgtacgtagcatgagcctgagtggagacgttggacgtgtatgtatatacctctctgcgtgttaactatgtacgtaagcggcaggcagtgcaataagtgtggctctgtagtatgtacgtgcgggtacgatgctgtaagctactgaggcaagtccataaataaataatgacacgtgcgtgttctataatctcttcgcttcttcatttgtccccttgcggagtttggcatccattgatgccgttacgctgagaacagacacagcagacgaaccaaaagtgagttcttgtatgaaactatgacccttcatcgctaggctcaaacagcaccccgtacgaacacagcaaattagtcatctaactattagcccctacatgtttcagacgatacataaatatagcccatccttagcaattagctattggccctgcccatcccaagcaatgatctcgaagtatttttaatatatagtatttttaatatgtagcttttaaaattagaagataattttgagacaaaaatctccaagtatttttttgggtattttttactgcctccgtttttctttatttctcgtcacctagtttaattttgtgctaatcggctataaacgaaacagagagaaaagttactctaaaagcaactccaacagattagatataaatcttatatcctgcctagagctgttaaaaagatagacaactttagtggattagtgtatgcaacaaactctccaaatttaagtatcccaactacccaacgcatatcgttcccttttcattggcgcacgaactttcacctgctatagccgacgtacatgttcgttttttttgggcggcgcttactttcttccccgttcgttctcagcatcgcaactcaatttgttatggcggagaagcccttgtatcccaggtagtaatgcacagatatgcattattattattcataaaatcgagctagttaccctatgaggtgacatgaagcgctcacggttactatgacggttagcttcacgactgttggtggcagtagcgtacgacttagctatagttccggacttacctaactgactagagtcacacttagctgaccctagtcacttaggcgcgccaagcttggatctcctgcaggatctggccggccggatgggcggatctcgtacctcaactttgtatagaaaagttgggccagaatggcccggaccgggttaccaagcggccgcgaattccagaagaccaaagggcaattgagacttttcaacaaagggtaatatcgggaaacctcctcggattccattgcccagctatctgtcacttcatcaaaaggacagtagaaaaggaaggtggcacctacaaatgccatcattgcgataaaggaaaggctatcgttcaagatgcctctgccgacagtggtcccaaagatggacccccacccacgaggagcatcgtggaaaaagaagacgttccaaccacgtcttcaaagcaagtggattgatgtgatatctccactgacgtaagggatgacgcacaatcccactatccttcgcaagacccttcctctatataaggaagttcatttcatttggagaggacccatggaacctcaccaacaacaaccaaatgaggataataacggtggcgccaaagggaactttctttgcaggcaaaccagtacaaggtggaatcccactactgaccagataagaatattgaaggaactgtactacatcaaaggtgttaggtccccaaatggagctgagattcagcagatctctgctaggcttagaaagtacggcaagattgaaggcaagaatgtattttattggtttcagaaccataaagctcgtgagaggcaaaagaaaagactcaccaatgaagtccccatgcaacaaagaactgcctggaaacctgaagattattactcttacaagtactccaacagtaataataatcctgggttttcttcggcttcttcatctgcaaataccggtgtggttactgttgggcagacagatagtcatggatatggatcggtaaccatgcaggagaagaattcttgggactgttcagcaccagctggtggtagcaatggtgctggtagtggatccatgagcaatattaactatggatcaggggttgacattaactctcacagttcatcctatgctgtatttggtcaagaacaagaagcagctgcaaagattgagactcttcctctatttccaatgcttggtgaggacatcagtagctctttcaacatcaacaatatcaacccagacttttattacagtagcggctgtggctatggtgattatggcaatgacacttcttcccgtacttccctggaccttagtctctactcctacaatggccaaccacaagattattaggtacctgacatcttatagtctgcaacctctcgtgtctgaattcctatctttatcaagtgttattgcttccacgactataggacagctttcgtcgaaaggttttgctcatgtgatctcgaaggattcatctagtctgatttttcgtgacttgtatcggttttattggattcatccaacatatatcaataaaaaatgagttgtgtttcctttcttcctagttcagttaaaattatttccctcctgcgcttgtgctgtaattgtctgtgtacctgttgtttgtgactgtgttagttcccttggatatgatttcgtatttgatatgtacatggagatagcttagcttcattattggagtatgaagttagtatgacatagtcactctcctggaaaattgacactgcaaaccatatttttattctgaaccacaaatcctagtcagtccgctggcatatgccgtccgtttgctgaatccagaacgtgggtttggagatgtacggctgagatgcctctatgcgaaggggatttcgtggtgaaacgagatgggagtagagcaacgcccgtggaagatgcttcaaacttccacacttttgagcaacgatcggcagtagtaaggtagacgatttcaagatcaaagcatatgaagataaacaacatcaacaacaaaatttgttggggttctatagagagaaacagagctacatacatacactgttttgtatctaccatctgagatgatgaaaagatgaaaaactaaagaatgccccggcgccaacgccaggacacgccgcgcgcgcgtcacccgagccatctcttgacccagccggcgctgtatatttacacacgttgcagcatcgatcaccacctgttcgatcgcgtcgccgtcaccaagcttggcgcgccggtcacccggtccgggcctagaaggccacccggggctcggcgttaggcttttagtccgctaggtggctagaccgaggttaggacgctagttcactaggggcctagtggtgttttaaggatgggcaagtttgtacaaaaaagcaggctggcgccggaaccaattcagtcgagtgcggccgccagtgtgatggatatctcgacccgggtgattgcggttacatcatgtacggaaaaataattctaatccttgatttaaatttgaacttgactatttatttattctttatttcattttgtaaatcattttatgtatctcctggcaagcaattttatccaccttgcaccaacaccttcgggttccataatcaaaccaccttaacttcacaccatgctgtaactcacaccgcccagcatctccaatgtgaaagaagctaaaatttaataaacaatcatacgaagcagtgacaaaataccagatggtattaatgcttcgataaaattaattggaaagtataaaatggtagaaaataataaattataattaatttaagtaagataaaaaataattaaaaactaaaatgttaaaattttaaaaaaattattttaaataatatttaaaaacattaaaaatcattttaaaaaatttatttatagaacaattaaataaatatttcagctaataaaaaacaaaagcttacctagccttagaagacaacttgtccaacaattagatgatacccattgcccttacgttttctttaacatcaattattgtttttgtcaacaagctatcttttagttttattttattggtaaaaaatatgtcgccttcaagttgcatcatttaacacatctcgtcattagaaaaataaaactcttccctaaacgattagtagaaaaaatcattcgataataaataagaaagaaaaattagaaaaaaataacttcattttaaaaaaatcattaaggctatattttttaaatgactaattttatatagactgtaactaaaagtatacaatttattatgctatgtatcttaaagaattacttataaaaatctacggaagaatatcttacaaagtgaaaaacaaatgagaaagaatttagtgggatgattatgattttatttgaaaattgaaaaaataattattaaagactttagtggagtaagaaagctttcctattagtcttttcttatccataaaaaaaaaaaaaaaaatctagcgtgacagcttttccatagattttaataatgtaaaatactggtagcagccgaccgttcaggtaatggacactgtggtcctaacttgcaacgggtgcgggcccaatttaataacgccgtggtaacggataaagccaagcgtgaagcggtgaaggtacatctctgactccgtcaagattacgaaaccgtcaactacgaaggactccccgaaatatcatctgtgtcataaacaccaagtcacaccatacatgggcacgcgtcacaatatgattggagaacggttccaccgcatatgctataaaatgcccccacacccctcgaccctaatcgcacttcaattgcaatcaaattagttcattctctttgcgcagttccctacctctcctttcaaggttcgtagatttcttccgtttttttttcttcttctttattgtttgttctacatcagcatgatgttgatttgattgtgttttctatcgtttcatcgattataaattttcataatcagaagattcagcttttattaatgcaagaacgtccttaattgatgattttataaccgtaaattaggtctaattagagtttttttcataaagattttcagatccgtttacaacaagccttaattgttgattctgtagtcgtagattaaggtttttttcatgaactacttcagatccgttaaacaacagccttatttgttgatacttcagtcgtttttcaagaaattgttcagatccgttgataaaagccttattcgttgattctgtatggtatttcaagagatattgctcaggtcctttagcaactaccttatttgttgattctgtggccatagattaggattttttttcacgaaattgcttcttgaaattacgtgatggattttgattctgatttatcttgtgattgttgactctacagccatggcccacagcaagcacggcctgaaggaggagatgaccatgaagtaccacatggagggctgcgtgaacggccacaagttcgtgatcaccggcgagggcatcggctaccccttcaagggcaagcagaccatcaacctgtgcgtgatcgagggcggccccctgcccttcagcgaggacatcctgagcgccggcttcaagtacggcgaccggatcttcaccgagtacccccaggacatcgtggactacttcaagaacagctgccccgccggctacacctggggccggagcttcctgttcgaggacggcgccgtgtgcatctgtaacgtggacatcaccgtgagcgtgaaggagaactgcatctaccacaagagcatcttcaacggcgtgaacttccccgccgacggccccgtgatgaagaagatgaccaccaactgggaggccagctgcgagaagatcatgcccgtgcctaagcagggcatcctgaagggcgacgtgagcatgtacctgctgctgaaggacggcggccggtaccggtgccagttcgacaccgtgtacaaggccaagagcgtgcccagcaagatgcccgagtggcacttcatccagcacaagctgctgcgggaggaccggagcgacgccaagaaccagaagtggcagctgaccgagcacgccatcgccttccccagcgccctggcctgagagctcgaatttccccgatcgttcaaacatttggcaataaagtttcttaagattgaatcctgttgccggtcttgcgatgattatcatataatttctgttgaattacgttaagcatgtaataattaacatgtaatgcatgacgttatttatgagatgggtttttatgattagagtcccgcaattatacatttaatacgcgatagaaaacaaaatatagcgcgcaaactaggataaattatcgcgcgcggtgtcatctatgttactagatcgggaattctagtggccggcccagctgatatctagacccagctttcttgtacaaagtggccgttaacggatcggccagaatggcccggaccgggttaccgaattcgagctcggtaccctgggatccgatatcgatgggccctggccgaagcttggtcacccggtccgggcctagaaggccagcttcggccgccccgggcaactttattatacaaagttgatggtacggatccgtcgacggcgcgccgcggacctgaattccagcacactggcggccgttagtctaaaaacggcccctaactaacgcttagttgcccgctagattagtcccccgttagtgcctagttagacacacgacgaactaggggctactagtaacggccgccagtgtgctcggtacggccagaatggccatctggattcagcagggggtgattgcggttacatcatgtacggaaaaataattctaatccttgatttaaatttgaacttgactatttatttattctttatttcattttgtaaatcattttatgtatctcctggcaagcaattttatccaccttgcaccaacaccttcgggttccataatcaaaccaccttaacttcacaccatgctgtaactcacaccgcccagcatctccaatgtgaaagaagctaaaatttaataaacaatcatacgaagcagtgacaaaataccagatggtattaatgcttcgataaaattaattggaaagtataaaatggtagaaaataataaattataattaatttaagtaagataaaaaataattaaaaactaaaatgttaaaattttaaaaaaattattttaaataatatttaaaaacattaaaaatcattttaaaaaatttatttatagaacaattaaataaatatttcagctaataaaaaacaaaagcttacctagccttagaagacaacttgtccaacaattagatgatacccattgcccttacgttttctttaacatcaattattgtttttgtcaacaagctatcttttagttttattttattggtaaaaaatatgtcgccttcaagttgcatcatttaacacatctcgtcattagaaaaataaaactcttccctaaacgattagtagaaaaaatcattcgataataaataagaaagaaaaattagaaaaaaataacttcattttaaaaaaatcattaaggctatattttttaaatgactaattttatatagactgtaactaaaagtatacaatttattatgctatgtatcttaaagaattacttataaaaatctacggaagaatatcttacaaagtgaaaaacaaatgagaaagaatttagtgggatgattatgattttatttgaaaattgaaaaaataattattaaagactttagtggagtaagaaagctttcctattagtcttttcttatccataaaaaaaaaaaaaaaaatctagcgtgacagcttttccatagattttaataatgtaaaatactggtagcagccgaccgttcaggtaatggacactgtggtcctaacttgcaacgggtgcgggcccaatttaataacgccgtggtaacggataaagccaagcgtgaagcggtgaaggtacatctctgactccgtcaagattacgaaaccgtcaactacgaaggactccccgaaatatcatctgtgtcataaacaccaagtcacaccatacatgggcacgcgtcacaatatgattggagaacggttccaccgcatatgctataaaatgcccccacacccctcgaccctaatcgcacttcaattgcaatcaaattagttcattctctttgcgcagttccctacctctcctttcaaggttcgtagatttcttccgtttttttttcttcttctttattgtttgttctacatcagcatgatgttgatttgattgtgttttctatcgtttcatcgattataaattttcataatcagaagattcagcttttattaatgcaagaacgtccttaattgatgattttataaccgtaaattaggtctaattagagtttttttcataaagattttcagatccgtttacaacaagccttaattgttgattctgtagtcgtagattaaggtttttttcatgaactacttcagatccgttaaacaacagccttatttgttgatacttcagtcgtttttcaagaaattgttcagatccgttgataaaagccttattcgttgattctgtatggtatttcaagagatattgctcaggtcctttagcaactaccttatttgttgattctgtggccatagattaggattttttttcacgaaattgcttcttgaaattacgtgatggattttgattctgatttatcttgtgattgttgactctacagccatggctgcaactactcttacatctgctttacctggtgctttcagttcatcccagagaccaagtgctcctttcaacttacaaagatcacctagagtgcttagaaggttcaacagaaagacaggacgtcaacctcgtggacttgttcgtgctgcaaaggctcaagcggcgcaaaacctgccagagaaattcgatgaaacaagactctgggaggccctcaggggatttggggttagtccaagtagggttacttacgctcccgtcggattcggagattaccactggaccgtcacagatgaagacgggagaccttggttcgcaactgtcagtgacctcgaacacaaagagcattgcgggcagggagcacaagcagcccttaaaggactcagacaagctatggacactgccctcgcacttagagatagggacggactcagattcgtggttgctccagtggcagcaacagatgggggtggccctgtccttccccttgacgctaggtatgcactcacagtcttccctcacgtcccaggaagaacaggagagttcggacaaagactcacagaggcagagagggacagactgcttgctcttctggcagaactccacggaagaacacctcctgaaacaaccccaccagccgatatggaaccaccaggacttcctggtgttagagcagcactcgccgaaagtgaaggaccttggagtggaggaccatttgcagaacccgctagacttcttctcagagaacacgaggccacactgcacgcaagactcgctgaattcgaagccctcgtcgcaagagttaagggtcgtggagcacctcttgtcgttacccacggagaaccacacccaggcaacttgatcctcggagaggaaggctatctcctcgtggactgggatacagttggactggctccagctgaaagggatttgagtctcatctcagacgacccagctgacctcgcaagatacgcagagcttacaggaagaactccagacccagacgcactcgcactctatagactgcgttggagtctccttgatgtggctgagttcgtcgagtggttcagggctgaacaccaaagaacccaagacaccgagagtgcatggaaggggttcactgacacacttgggcaattggctgctggtggatcagctgcatagcaaacttatctctgttatgaatcagaagaagttcatgtctcgtttcatttaaaactttggtggtttgtgttttggggccttgtaaagcccctgatgaataattgttcaactatgtttccgttcctgtgttatacctttctttctaatgagtaatgacatcaaacttcttctgtattgaaattatgtccttgtgagtctctttatcatcgtttcgtctttacattatatgtgctacttttgtctaatgagcctgaaaagtggctccaatggtacgcactggaagatttgttggcttctggtagatatagcgacagtgttgagcttgtaatatcatgtctcttattgctaaattagttcctttcttaacagaaaccttcaaagtttttgtttttgttttcatttacctaatgtacacatacgctggccatgactaacaacatgtccaggcttagagcatatttttttctagcttaaattgttaacttgtcattcagtaaaatccgagaattgtgaagctctaattgaagctaattcgttttataaagtcagttaaaaagtatactaaattatccaacttttcttcaaaatctcaaaattctatgacaaaacgatagtctttgtttatgtcagtaccacaaagaggtggaaaaaaacaccaaaaaaacaataagcaaactatacactgagaagaaaaataaaagagagctcaatagatgttttatactaacggtagattagatcaaagatccaagctttactctacatagagcagaacccagaatcccttcatatctcttttattctagcaccgataatctactgaaaagaagacacttagagctctgtctctttgtcaaagaagtcccagccgtcatccagaagctccttacgttcattaacagaggccgcaattggatcgggtttacttattttgtgggtatctatacttttattagatttttaatcaggctcctgatttctttttatttcgattgaattcctgaacttgtattattcagtagatcgaataaattataaaaagataaaatcataaaataatattttatcctatcaatcatattaaagcaatgaatatgtaaaattaatcttatctttattttaaaaaatcatataggtttagtatttttttaaaaataaagataggattagttttactattcactgcttattacttttaaaaaaatcataaaggtttagtatttttttaaaataaatataggaatagttttactattcactgctttaatagaaaaatagtttaaaatttaagatagttttaatcccagcatttgccacgtttgaacgtgagccgaaacgatgtcgttacattatcttaacctagctgaaacgatgtcgtcataatatcgccaaatgccaactggactacgtcgaacccacaaatcccacaaagcgcgtgaaatcaaatcgctcaaaccacaaaaaagaacaacgcgtttgttacacgctcaatcccacgcgagtagagcacagtaaccttcaaataagcgaatggggcataatcagaaatccgaaataaacctaggggcattatcggaaatgaaaagtagctcactcaatataaaaatctaggaaccctagttttcgttatcactctgtgctccctcgctctatttctcagtctctgtgtttgcggctgaggattccgaacgagtgaccttcttcgtttctcgcaaaggtaacagcctctgctcttgtctcttcgattcgatctatgcctgtctcttatttacgatgatgtttcttcggttatgtttttttatttatgctttatgctgttgatgttcggttgtttgtttcgctttgtttttgtggttcagttttttaggattcttttggtttttgaatcgattaatcggaagagattttcgagttatttggtgtgttggaggtgaatcttttttttgaggtcatagatctgttgtatttgtgttataaacatgcgactttgtatgattttttacgaggttatgatgttctggttgttttattatgaatctgttgagacagaaccatgatttttgttgatgttcgtttacactattaaaggtttgttttaacaggattaaaagttttttaagcatgttgaaggagtcttgtagatatgtaaccgtcgatagtttttttgtgggtttgttcacatgttatcaagcttaatcttttactatgtatgcgaccatatctggatccagcaaaggcgattttttaattccttgtgaaacttttgtaatatgaagttgaaattttgttattggtaaactataaatgtgtgaagttggagtatacctttaccttcttatttggctttgtgatagtttaatttatatgtattttgagttctgacttgtatttctttgaattgattctagtttaagtaatcatggcctcctccgagaacgtcatcaccgagttcatgcgcttcaaggtgcgcatggagggcaccgtgaacggccacgagttcgagatcgagggcgagggcgagggccgcccctacgagggccacaacaccgtgaagctgaaggtgacgaagggcggccccctgcccttcgcctgggacatcctgtccccccagttccagtacggctccaaggtgtacgtgaagcaccccgccgacatccccgactacaagaagctgtccttccccgagggcttcaagtgggagcgcgtgatgaacttcgaggacggcggcgtggcgaccgtgacccaggactcctccctgcaggacggctgcttcatctacaaggtgaagttcatcggcgtgaacttcccctccgacggccccgtgatgcagaagaagaccatgggctgggaggcctccaccgagcgcctgtacccccgcgacggcgtgctgaagggcgagacccacaaggccctgaagctgaaggacggcggccactacctggtggagttcaagtccatctacatggccaagaagcccgtgcagctgcccggctactactacgtggacgccaagctggacatcacctcccacaacgaggactacaccatcgtggagcagtacgagcgcaccgagggccgccaccacctgttcctgtagttttgtgatctgatgataagtggttggttcgtgtctcatgcacttgggaggtgatctatttcacctggtgtagtttgtgtttccgtcagttggaaaaacttatccctatcgatttcgttttcattttctgcttttcttttatgtaccttcgtttgggcttgtaacgggcctttgtatttcaactctcaataataatccaagtgcatgttaaacaatttgtcatctgtttcggctttgatatactactggtgaagatgggccgtactactgcatcacaacgaaaaataataataagatgaaaaacttgaagtggaaaaaaaaaaaaacttgaatgttcactactactcattgaccataatgtttaacatacatagctcaatagtatttttgtgaatatggcaacacaaacagtccaaaacaattgtctcttactataccaaaccaagggcgccgcttgtttgccactctttgtgtgcaatagtgtgattaccacatctccacattcaatatattccctgaattatctgacgattttgatggctcactgttttcccaagtcttgaattgtcttctgtgcgccagtcaaatgcatatgtgttgagtttatcttttaaatatcaagcttttgtttttaacttttgtttgtaaccaaaaactcacagtaggagtttgatcacataattttatgtttgcctttgcaatttctagtgagtctttgattaaaagcttgaaaagaaaatgcagccaagcttaccaagtaagttatgtgtattaaccagaggaagagagaatcttgcaaaatttcaacaaacacaaaaagaagtattactacgattggtggagaaagaaaacgattccaaatcttgaactgttgttgtaaaagcatagcagaaagtgggagacaaccgaaatagaaatgactataacttaatttaatgttatcattataatttcttctagcaaatatttagaaagtaaatatcacatcaacctttaatgtaattaagctttctctttttgattcatgtgagatgaaaagaaaaaaaagaagagaaaagtgtagaaaacacatcatttctaagctgaagctgaggtacaaattaattaataagtgactagggtcacgtgaccctagtcacttatgattccgatgacttcgtaggttcctagctcaagccgctcgtgtccaagcgtcacttacgattagctaatgattacggcatctaggaccgactagttcttatgtgcttctagtctccaaatgtggttgatagttattttgctctaagatcaacagtaatgaagtataaatcatcgttgtggtgtgctactcggttaattgagcattaacacacacaaacatgacgaggatggtataatctccaaaaatgtgtactttgttaggtgggaccctatagccttgattaatgtgctatgttaggcatgcctggaaacgtgtgacgcatatgttttgtgaacctgttgatattatatgtgcttttatattaccatattttattaaaatactaatatttattactagtaagatataacattctatctagcttaaaaactaaccataaatattccataataactagatttaccaaactaatatactaaatatacataataaatacaaaattaacaagacaataatcaatatttatgagcttaatatatttagacattatggttggtcgacgataatcatgctaacttttcgtaattgcttgattgaaatatgcttagaataatgcctctttgttctacatggcaaatagggaccattatggtgtaacaccctgggaaccacaaacaccccgaaatgctactaaactacacaactaaccttcatatataaaatttcgacagcatctcctttgaaaatttgcatagacgtggaagcaacagagtataaacagatctagctagctaagtttaaacggccggccaaacgtgcaagcgctactagacaattcagtacattaaaaacgtccgcaatgtgttattaagttgtctaagcgtcaatttatttacaattgaatatatcctgcca

SEQ ID NO: 165 - DNA, 15478 bp, Artificial Sequence
  RV026533 T-DNA
caaacaaacatacacagcgatttattcacacgaacccgaattacaacggtatatatcctgtcagccaacaccaaaacatcaaaaaaatcgggatcaggatcaggatctgcggccgcatcctgcaggtttaaacggccggccttcactagctagctgctaagctcaaacgagcaggaagcaacgagagggtggcgcgcgaccgacgtgcgtacgtagcatgagcctgagtggagacgttggacgtgtatgtatatacctctctgcgtgttaactatgtacgtaagcggcaggcagtgcaataagtgtggctctgtagtatgtacgtgcgggtacgatgctgtaagctactgaggcaagtccataaataaataatgacacgtgcgtgttctataatctcttcgcttcttcatttgtccccttgcggagtttggcatccattgatgccgttacgctgagaacagacacagcagacgaaccaaaagtgagttcttgtatgaaactatgacccttcatcgctaggctcaaacagcaccccgtacgaacacagcaaattagtcatctaactattagcccctacatgtttcagacgatacataaatatagcccatccttagcaattagctattggccctgcccatcccaagcaatgatctcgaagtatttttaatatatagtatttttaatatgtagcttttaaaattagaagataattttgagacaaaaatctccaagtatttttttgggtattttttactgcctccgtttttctttatttctcgtcacctagtttaattttgtgctaatcggctataaacgaaacagagagaaaagttactctaaaagcaactccaacagattagatataaatcttatatcctgcctagagctgttaaaaagatagacaactttagtggattagtgtatgcaacaaactctccaaatttaagtatcccaactacccaacgcatatcgttcccttttcattggcgcacgaactttcacctgctatagccgacgtacatgttcgttttttttgggcggcgcttactttcttccccgttcgttctcagcatcgcaactcaatttgttatggcggagaagcccttgtatcccaggtagtaatgcacagatatgcattattattattcataaaatcgagctagttaccctatgaggtgacatgaagcgctcacggttactatgacggttagcttcacgactgttggtggcagtagcgtacgacttagctatagttccggacttacctaactgactagagtcacacttagctgaccctagtcacttaggcgcgccaagcttggatctcctgcaggatctggccggccggatgggcggatctcgtacctcaactttgtatagaaaagttgggccagaatggcccggaccgggttaccaagcggccgcgaattccagaagaccaaagggcaattgagacttttcaacaaagggtaatatcgggaaacctcctcggattccattgcccagctatctgtcacttcatcaaaaggacagtagaaaaggaaggtggcacctacaaatgccatcattgcgataaaggaaaggctatcgttcaagatgcctctgccgacagtggtcccaaagatggacccccacccacgaggagcatcgtggaaaaagaagacgttccaaccacgtcttcaaagcaagtggattgatgtgatatctccactgacgtaagggatgacgcacaatcccactatccttcgcaagacccttcctctatataaggaagttcatttcatttggagaggacccatggagtttcaacaacaacaagatgaagagatgataaaccatgttgggaaaatgagcaacaacacaagtaacaataataataataataataactatttatgtagacaaagtagcacaagatggactccaacaacagaacaaataaagcttttaaaagatctttattatttacaaggaattagatctcctactgctgatcaaattcaaagcatttgtgctaggttacgtcgttatggaaaaattgaaggcaaaaatgttttttattggtttcaaaatcataaggctagggaaagacaaaaaaagaagcttactcctacttctcctaataataataataataataataataataatttcataagaaataataataataataataataatggaaatattaacacttttcatgctaaatatccttgttccttcaataataatcccggggtttcttgttcaagttcaccagcaggtgtgatttctggaggtgggcaattgatggggagttttgggtatggagctgtgactatggagactaaatttagggtaagaggaggtattcctattccaaatggagcaaatcaatggagtaactatttcaacccaaacaatccaacatcttactcaaatttctttattgacaaggtatcatcaaatgttgatcatcattatccatacattaaccatcatgatcatgatcatgatcatgatcatcatgatcatgatcattatggcccacaatcacctcatgagattcagactcttcctctctttcccatgcacaatgatcatcatgatctcgatctcgatctcgatctcgatcacgatcaagggttctacacctataagcctcaatcggacggctgtaattataccggaggatatcgatggtcatctaatgttaatggtggacatacttctcttgagcttagtcttaactcttatggatttggatgctattcacctaattaaggtacctgacatcttatagtctgcaacctctcgtgtctgaattcctatctttatcaagtgttattgcttccacgactataggacagctttcgtcgaaaggttttgctcatgtgatctcgaaggattcatctagtctgatttttcgtgacttgtatcggttttattggattcatccaacatatatcaataaaaaatgagttgtgtttcctttcttcctagttcagttaaaattatttccctcctgcgcttgtgctgtaattgtctgtgtacctgttgtttgtgactgtgttagttcccttggatatgatttcgtatttgatatgtacatggagatagcttagcttcattattggagtatgaagttagtatgacatagtcactctcctggaaaattgacactgcaaaccatatttttattctgaaccacaaatcctagtcagtccgctggcatatgccgtccgtttgctgaatccagaacgtgggtttggagatgtacggctgagatgcctctatgcgaaggggatttcgtggtgaaacgagatgggagtagagcaacgcccgtggaagatgcttcaaacttccacacttttgagcaacgatcggcagtagtaaggtagacgatttcaagatcaaagcatatgaagataaacaacatcaacaacaaaatttgttggggttctatagagagaaacagagctacatacatacactgttttgtatctaccatctgagatgatgaaaagatgaaaaactaaagaatgccccggcgccaacgccaggacacgccgcgcgcgcgtcacccgagccatctcttgacccagccggcgctgtatatttacacacgttgcagcatcgatcaccacctgttcgatcgcgtcgccgtcaccaagcttggcgcgccggtcacccggtccgggcctagaaggccacccggggctcggcgttaggcttttagtccgctaggtggctagaccgaggttaggacgctagttcactaggggcctagtggtgttttaaggatgggcaagtttgtacaaaaaagcaggctggcgccggaaccaattcagtcgagtgcggccgccagtgtgatggatatctcgacccgggtgattgcggttacatcatgtacggaaaaataattctaatccttgatttaaatttgaacttgactatttatttattctttatttcattttgtaaatcattttatgtatctcctggcaagcaattttatccaccttgcaccaacaccttcgggttccataatcaaaccaccttaacttcacaccatgctgtaactcacaccgcccagcatctccaatgtgaaagaagctaaaatttaataaacaatcatacgaagcagtgacaaaataccagatggtattaatgcttcgataaaattaattggaaagtataaaatggtagaaaataataaattataattaatttaagtaagataaaaaataattaaaaactaaaatgttaaaattttaaaaaaattattttaaataatatttaaaaacattaaaaatcattttaaaaaatttatttatagaacaattaaataaatatttcagctaataaaaaacaaaagcttacctagccttagaagacaacttgtccaacaattagatgatacccattgcccttacgttttctttaacatcaattattgtttttgtcaacaagctatcttttagttttattttattggtaaaaaatatgtcgccttcaagttgcatcatttaacacatctcgtcattagaaaaataaaactcttccctaaacgattagtagaaaaaatcattcgataataaataagaaagaaaaattagaaaaaaataacttcattttaaaaaaatcattaaggctatattttttaaatgactaattttatatagactgtaactaaaagtatacaatttattatgctatgtatcttaaagaattacttataaaaatctacggaagaatatcttacaaagtgaaaaacaaatgagaaagaatttagtgggatgattatgattttatttgaaaattgaaaaaataattattaaagactttagtggagtaagaaagctttcctattagtcttttcttatccataaaaaaaaaaaaaaaaatctagcgtgacagcttttccatagattttaataatgtaaaatactggtagcagccgaccgttcaggtaatggacactgtggtcctaacttgcaacgggtgcgggcccaatttaataacgccgtggtaacggataaagccaagcgtgaagcggtgaaggtacatctctgactccgtcaagattacgaaaccgtcaactacgaaggactccccgaaatatcatctgtgtcataaacaccaagtcacaccatacatgggcacgcgtcacaatatgattggagaacggttccaccgcatatgctataaaatgcccccacacccctcgaccctaatcgcacttcaattgcaatcaaattagttcattctctttgcgcagttccctacctctcctttcaaggttcgtagatttcttccgtttttttttcttcttctttattgtttgttctacatcagcatgatgttgatttgattgtgttttctatcgtttcatcgattataaattttcataatcagaagattcagcttttattaatgcaagaacgtccttaattgatgattttataaccgtaaattaggtctaattagagtttttttcataaagattttcagatccgtttacaacaagccttaattgttgattctgtagtcgtagattaaggtttttttcatgaactacttcagatccgttaaacaacagccttatttgttgatacttcagtcgtttttcaagaaattgttcagatccgttgataaaagccttattcgttgattctgtatggtatttcaagagatattgctcaggtcctttagcaactaccttatttgttgattctgtggccatagattaggattttttttcacgaaattgcttcttgaaattacgtgatggattttgattctgatttatcttgtgattgttgactctacagccatggcccacagcaagcacggcctgaaggaggagatgaccatgaagtaccacatggagggctgcgtgaacggccacaagttcgtgatcaccggcgagggcatcggctaccccttcaagggcaagcagaccatcaacctgtgcgtgatcgagggcggccccctgcccttcagcgaggacatcctgagcgccggcttcaagtacggcgaccggatcttcaccgagtacccccaggacatcgtggactacttcaagaacagctgccccgccggctacacctggggccggagcttcctgttcgaggacggcgccgtgtgcatctgtaacgtggacatcaccgtgagcgtgaaggagaactgcatctaccacaagagcatcttcaacggcgtgaacttccccgccgacggccccgtgatgaagaagatgaccaccaactgggaggccagctgcgagaagatcatgcccgtgcctaagcagggcatcctgaagggcgacgtgagcatgtacctgctgctgaaggacggcggccggtaccggtgccagttcgacaccgtgtacaaggccaagagcgtgcccagcaagatgcccgagtggcacttcatccagcacaagctgctgcgggaggaccggagcgacgccaagaaccagaagtggcagctgaccgagcacgccatcgccttccccagcgccctggcctgagagctcgaatttccccgatcgttcaaacatttggcaataaagtttcttaagattgaatcctgttgccggtcttgcgatgattatcatataatttctgttgaattacgttaagcatgtaataattaacatgtaatgcatgacgttatttatgagatgggtttttatgattagagtcccgcaattatacatttaatacgcgatagaaaacaaaatatagcgcgcaaactaggataaattatcgcgcgcggtgtcatctatgttactagatcgggaattctagtggccggcccagctgatatctagacccagctttcttgtacaaagtggccgttaacggatcggccagaatggcccggaccgggttaccgaattcgagctcggtaccctgggatccgatatcgatgggccctggccgaagcttggtcacccggtccgggcctagaaggccagcttcggccgccccgggcaactttattatacaaagttgatggtacggatccgtcgacggcgcgccgcggacctgaattccagcacactggcggccgttagtctaaaaacggcccctaactaacgcttagttgcccgctagattagtcccccgttagtgcctagttagacacacgacgaactaggggctactagtaacggccgccagtgtgctcggtacggccagaatggccatctggattcagcagggggtgattgcggttacatcatgtacggaaaaataattctaatccttgatttaaatttgaacttgactatttatttattctttatttcattttgtaaatcattttatgtatctcctggcaagcaattttatccaccttgcaccaacaccttcgggttccataatcaaaccaccttaacttcacaccatgctgtaactcacaccgcccagcatctccaatgtgaaagaagctaaaatttaataaacaatcatacgaagcagtgacaaaataccagatggtattaatgcttcgataaaattaattggaaagtataaaatggtagaaaataataaattataattaatttaagtaagataaaaaataattaaaaactaaaatgttaaaattttaaaaaaattattttaaataatatttaaaaacattaaaaatcattttaaaaaatttatttatagaacaattaaataaatatttcagctaataaaaaacaaaagcttacctagccttagaagacaacttgtccaacaattagatgatacccattgcccttacgttttctttaacatcaattattgtttttgtcaacaagctatcttttagttttattttattggtaaaaaatatgtcgccttcaagttgcatcatttaacacatctcgtcattagaaaaataaaactcttccctaaacgattagtagaaaaaatcattcgataataaataagaaagaaaaattagaaaaaaataacttcattttaaaaaaatcattaaggctatattttttaaatgactaattttatatagactgtaactaaaagtatacaatttattatgctatgtatcttaaagaattacttataaaaatctacggaagaatatcttacaaagtgaaaaacaaatgagaaagaatttagtgggatgattatgattttatttgaaaattgaaaaaataattattaaagactttagtggagtaagaaagctttcctattagtcttttcttatccataaaaaaaaaaaaaaaaatctagcgtgacagcttttccatagattttaataatgtaaaatactggtagcagccgaccgttcaggtaatggacactgtggtcctaacttgcaacgggtgcgggcccaatttaataacgccgtggtaacggataaagccaagcgtgaagcggtgaaggtacatctctgactccgtcaagattacgaaaccgtcaactacgaaggactccccgaaatatcatctgtgtcataaacaccaagtcacaccatacatgggcacgcgtcacaatatgattggagaacggttccaccgcatatgctataaaatgcccccacacccctcgaccctaatcgcacttcaattgcaatcaaattagttcattctctttgcgcagttccctacctctcctttcaaggttcgtagatttcttccgtttttttttcttcttctttattgtttgttctacatcagcatgatgttgatttgattgtgttttctatcgtttcatcgattataaattttcataatcagaagattcagcttttattaatgcaagaacgtccttaattgatgattttataaccgtaaattaggtctaattagagtttttttcataaagattttcagatccgtttacaacaagccttaattgttgattctgtagtcgtagattaaggtttttttcatgaactacttcagatccgttaaacaacagccttatttgttgatacttcagtcgtttttcaagaaattgttcagatccgttgataaaagccttattcgttgattctgtatggtatttcaagagatattgctcaggtcctttagcaactaccttatttgttgattctgtggccatagattaggattttttttcacgaaattgcttcttgaaattacgtgatggattttgattctgatttatcttgtgattgttgactctacagccatggctgcaactactcttacatctgctttacctggtgctttcagttcatcccagagaccaagtgctcctttcaacttacaaagatcacctagagtgcttagaaggttcaacagaaagacaggacgtcaacctcgtggacttgttcgtgctgcaaaggctcaagcggcgcaaaacctgccagagaaattcgatgaaacaagactctgggaggccctcaggggatttggggttagtccaagtagggttacttacgctcccgtcggattcggagattaccactggaccgtcacagatgaagacgggagaccttggttcgcaactgtcagtgacctcgaacacaaagagcattgcgggcagggagcacaagcagcccttaaaggactcagacaagctatggacactgccctcgcacttagagatagggacggactcagattcgtggttgctccagtggcagcaacagatgggggtggccctgtccttccccttgacgctaggtatgcactcacagtcttccctcacgtcccaggaagaacaggagagttcggacaaagactcacagaggcagagagggacagactgcttgctcttctggcagaactccacggaagaacacctcctgaaacaaccccaccagccgatatggaaccaccaggacttcctggtgttagagcagcactcgccgaaagtgaaggaccttggagtggaggaccatttgcagaacccgctagacttcttctcagagaacacgaggccacactgcacgcaagactcgctgaattcgaagccctcgtcgcaagagttaagggtcgtggagcacctcttgtcgttacccacggagaaccacacccaggcaacttgatcctcggagaggaaggctatctcctcgtggactgggatacagttggactggctccagctgaaagggatttgagtctcatctcagacgacccagctgacctcgcaagatacgcagagcttacaggaagaactccagacccagacgcactcgcactctatagactgcgttggagtctccttgatgtggctgagttcgtcgagtggttcagggctgaacaccaaagaacccaagacaccgagagtgcatggaaggggttcactgacacacttgggcaattggctgctggtggatcagctgcatagcaaacttatctctgttatgaatcagaagaagttcatgtctcgtttcatttaaaactttggtggtttgtgttttggggccttgtaaagcccctgatgaataattgttcaactatgtttccgttcctgtgttatacctttctttctaatgagtaatgacatcaaacttcttctgtattgaaattatgtccttgtgagtctctttatcatcgtttcgtctttacattatatgtgctacttttgtctaatgagcctgaaaagtggctccaatggtacgcactggaagatttgttggcttctggtagatatagcgacagtgttgagcttgtaatatcatgtctcttattgctaaattagttcctttcttaacagaaaccttcaaagtttttgtttttgttttcatttacctaatgtacacatacgctggccatgactaacaacatgtccaggcttagagcatatttttttctagcttaaattgttaacttgtcattcagtaaaatccgagaattgtgaagctctaattgaagctaattcgttttataaagtcagttaaaaagtatactaaattatccaacttttcttcaaaatctcaaaattctatgacaaaacgatagtctttgtttatgtcagtaccacaaagaggtggaaaaaaacaccaaaaaaacaataagcaaactatacactgagaagaaaaataaaagagagctcaatagatgttttatactaacggtagattagatcaaagatccaagctttactctacatagagcagaacccagaatcccttcatatctcttttattctagcaccgataatctactgaaaagaagacacttagagctctgtctctttgtcaaagaagtcccagccgtcatccagaagctccttacgttcattaacagaggccgcaattggatcgggtttacttattttgtgggtatctatacttttattagatttttaatcaggctcctgatttctttttatttcgattgaattcctgaacttgtattattcagtagatcgaataaattataaaaagataaaatcataaaataatattttatcctatcaatcatattaaagcaatgaatatgtaaaattaatcttatctttattttaaaaaatcatataggtttagtatttttttaaaaataaagataggattagttttactattcactgcttattacttttaaaaaaatcataaaggtttagtatttttttaaaataaatataggaatagttttactattcactgctttaatagaaaaatagtttaaaatttaagatagttttaatcccagcatttgccacgtttgaacgtgagccgaaacgatgtcgttacattatcttaacctagctgaaacgatgtcgtcataatatcgccaaatgccaactggactacgtcgaacccacaaatcccacaaagcgcgtgaaatcaaatcgctcaaaccacaaaaaagaacaacgcgtttgttacacgctcaatcccacgcgagtagagcacagtaaccttcaaataagcgaatggggcataatcagaaatccgaaataaacctaggggcattatcggaaatgaaaagtagctcactcaatataaaaatctaggaaccctagttttcgttatcactctgtgctccctcgctctatttctcagtctctgtgtttgcggctgaggattccgaacgagtgaccttcttcgtttctcgcaaaggtaacagcctctgctcttgtctcttcgattcgatctatgcctgtctcttatttacgatgatgtttcttcggttatgtttttttatttatgctttatgctgttgatgttcggttgtttgtttcgctttgtttttgtggttcagttttttaggattcttttggtttttgaatcgattaatcggaagagattttcgagttatttggtgtgttggaggtgaatcttttttttgaggtcatagatctgttgtatttgtgttataaacatgcgactttgtatgattttttacgaggttatgatgttctggttgttttattatgaatctgttgagacagaaccatgatttttgttgatgttcgtttacactattaaaggtttgttttaacaggattaaaagttttttaagcatgttgaaggagtcttgtagatatgtaaccgtcgatagtttttttgtgggtttgttcacatgttatcaagcttaatcttttactatgtatgcgaccatatctggatccagcaaaggcgattttttaattccttgtgaaacttttgtaatatgaagttgaaattttgttattggtaaactataaatgtgtgaagttggagtatacctttaccttcttatttggctttgtgatagtttaatttatatgtattttgagttctgacttgtatttctttgaattgattctagtttaagtaatcatggcctcctccgagaacgtcatcaccgagttcatgcgcttcaaggtgcgcatggagggcaccgtgaacggccacgagttcgagatcgagggcgagggcgagggccgcccctacgagggccacaacaccgtgaagctgaaggtgacgaagggcggccccctgcccttcgcctgggacatcctgtccccccagttccagtacggctccaaggtgtacgtgaagcaccccgccgacatccccgactacaagaagctgtccttccccgagggcttcaagtgggagcgcgtgatgaacttcgaggacggcggcgtggcgaccgtgacccaggactcctccctgcaggacggctgcttcatctacaaggtgaagttcatcggcgtgaacttcccctccgacggccccgtgatgcagaagaagaccatgggctgggaggcctccaccgagcgcctgtacccccgcgacggcgtgctgaagggcgagacccacaaggccctgaagctgaaggacggcggccactacctggtggagttcaagtccatctacatggccaagaagcccgtgcagctgcccggctactactacgtggacgccaagctggacatcacctcccacaacgaggactacaccatcgtggagcagtacgagcgcaccgagggccgccaccacctgttcctgtagttttgtgatctgatgataagtggttggttcgtgtctcatgcacttgggaggtgatctatttcacctggtgtagtttgtgtttccgtcagttggaaaaacttatccctatcgatttcgttttcattttctgcttttcttttatgtaccttcgtttgggcttgtaacgggcctttgtatttcaactctcaataataatccaagtgcatgttaaacaatttgtcatctgtttcggctttgatatactactggtgaagatgggccgtactactgcatcacaacgaaaaataataataagatgaaaaacttgaagtggaaaaaaaaaaaaacttgaatgttcactactactcattgaccataatgtttaacatacatagctcaatagtatttttgtgaatatggcaacacaaacagtccaaaacaattgtctcttactataccaaaccaagggcgccgcttgtttgccactctttgtgtgcaatagtgtgattaccacatctccacattcaatatattccctgaattatctgacgattttgatggctcactgttttcccaagtcttgaattgtcttctgtgcgccagtcaaatgcatatgtgttgagtttatcttttaaatatcaagcttttgtttttaacttttgtttgtaaccaaaaactcacagtaggagtttgatcacataattttatgtttgcctttgcaatttctagtgagtctttgattaaaagcttgaaaagaaaatgcagccaagcttaccaagtaagttatgtgtattaaccagaggaagagagaatcttgcaaaatttcaacaaacacaaaaagaagtattactacgattggtggagaaagaaaacgattccaaatcttgaactgttgttgtaaaagcatagcagaaagtgggagacaaccgaaatagaaatgactataacttaatttaatgttatcattataatttcttctagcaaatatttagaaagtaaatatcacatcaacctttaatgtaattaagctttctctttttgattcatgtgagatgaaaagaaaaaaaagaagagaaaagtgtagaaaacacatcatttctaagctgaagctgaggtacaaattaattaataagtgactagggtcacgtgaccctagtcacttatgattccgatgacttcgtaggttcctagctcaagccgctcgtgtccaagcgtcacttacgattagctaatgattacggcatctaggaccgactagttcttatgtgcttctagtctccaaatgtggttgatagttattttgctctaagatcaacagtaatgaagtataaatcatcgttgtggtgtgctactcggttaattgagcattaacacacacaaacatgacgaggatggtataatctccaaaaatgtgtactttgttaggtgggaccctatagccttgattaatgtgctatgttaggcatgcctggaaacgtgtgacgcatatgttttgtgaacctgttgatattatatgtgcttttatattaccatattttattaaaatactaatatttattactagtaagatataacattctatctagcttaaaaactaaccataaatattccataataactagatttaccaaactaatatactaaatatacataataaatacaaaattaacaagacaataatcaatatttatgagcttaatatatttagacattatggttggtcgacgataatcatgctaacttttcgtaattgcttgattgaaatatgcttagaataatgcctctttgttctacatggcaaatagggaccattatggtgtaacaccctgggaaccacaaacaccccgaaatgctactaaactacacaactaaccttcatatataaaatttcgacagcatctcctttgaaaatttgcatagacgtggaagcaacagagtataaacagatctagctagctaagtttaaacggccggccaaacgtgcaagcgctactagacaattcagtacattaaaaacgtccgcaatgtgttattaagttgtctaagcgtcaatttatttacaattgaatatatcctgcca

SEQ ID NO: 166 - DNA, 15395 bp, Artificial Sequence
  RV026521 T-DNA
aattacaacggtatatatcctgtcagccaacaccaaaacatcaaaaaaatcgggatcaggatcaggatctgcggccgcatcctgcaggtttaaacggccggccttcactagctagctgctaagctcaaacgagcaggaagcaacgagagggtggcgcgcgaccgacgtgcgtacgtagcatgagcctgagtggagacgttggacgtgtatgtatatacctctctgcgtgttaactatgtacgtaagcggcaggcagtgcaataagtgtggctctgtagtatgtacgtgcgggtacgatgctgtaagctactgaggcaagtccataaataaataatgacacgtgcgtgttctataatctcttcgcttcttcatttgtccccttgcggagtttggcatccattgatgccgttacgctgagaacagacacagcagacgaaccaaaagtgagttcttgtatgaaactatgacccttcatcgctaggctcaaacagcaccccgtacgaacacagcaaattagtcatctaactattagcccctacatgtttcagacgatacataaatatagcccatccttagcaattagctattggccctgcccatcccaagcaatgatctcgaagtatttttaatatatagtatttttaatatgtagcttttaaaattagaagataattttgagacaaaaatctccaagtatttttttgggtattttttactgcctccgtttttctttatttctcgtcacctagtttaattttgtgctaatcggctataaacgaaacagagagaaaagttactctaaaagcaactccaacagattagatataaatcttatatcctgcctagagctgttaaaaagatagacaactttagtggattagtgtatgcaacaaactctccaaatttaagtatcccaactacccaacgcatatcgttcccttttcattggcgcacgaactttcacctgctatagccgacgtacatgttcgttttttttgggcggcgcttactttcttccccgttcgttctcagcatcgcaactcaatttgttatggcggagaagcccttgtatcccaggtagtaatgcacagatatgcattattattattcataaaatcgagctagttaccctatgaggtgacatgaagcgctcacggttactatgacggttagcttcacgactgttggtggcagtagcgtacgacttagctatagttccggacttacctaactgactagagtcacacttagctgaccctagtcacttaggcgcgccaagcttggatctcctgcaggatctggccggccggatgggcggatctcgtacctcaactttgtatagaaaagttgggccagaatggcccggaccgggttaccaagcggccgcgaattccagaagaccaaagggcaattgagacttttcaacaaagggtaatatcgggaaacctcctcggattccattgcccagctatctgtcacttcatcaaaaggacagtagaaaaggaaggtggcacctacaaatgccatcattgcgataaaggaaaggctatcgttcaagatgcctctgccgacagtggtcccaaagatggacccccacccacgaggagcatcgtggaaaaagaagacgttccaaccacgtcttcaaagcaagtggattgatgtgatatctccactgacgtaagggatgacgcacaatcccactatccttcgcaagacccttcctctatataaggaagttcatttcatttggagaggacccatggaacatcctgccaaacaacaacaacaagaacaaggaattaatgatcaaggtggtgaaggtggtggtggaagcaatggaaaaggtgggtttttgtgtaggcaaagtagcagtcgatggactccaacaactgaccaaatacgaatattgaaagagctttattataacaatggtgttcgctccccaagcgctgatcaaattcagaggatctctgctaggcttagacagtacggtaaaatcgaaggcaaaaacgttttttattggtttcaaaaccataaggctcgtgaaagacagaagaaaagattcacttcaaattctacttctcctattactacctccaatactactacaactactactgattttaaaatttcttcaactaataataatattaactggaagtctgaagatcattcctcctcttctcataacaaatttcctccaggaataacaattgctttaattgattcttgtttttgcagctccttcttcttcggttatggtcgccgttggccatatgggaaattacggatatgggagtgttcaatatcgtcgggaggaaatagcagtgtcgtcggttaccggagccacaacatgggatcatggatcggtatcgatccgtattcttctccggcagctgccgcggcggggggatcagccaatgtgtttgaaaaaacaaaatatgttgaagaaagcatggaagatcacgaggagcaagagatcgaaactctcccccttttccccattcatggtgaccggaataatctcggtggtttctgcagcatgaagccggaatattcagagagctactacaccaccacttggtacgggcggtctgacgataatggagccgccggttctcgggcttcgctggaactcagcctcaactcttacgccaccatctcacctgatgatggaatgtgaggtacctgacatcttatagtctgcaacctctcgtgtctgaattcctatctttatcaagtgttattgcttccacgactataggacagctttcgtcgaaaggttttgctcatgtgatctcgaaggattcatctagtctgatttttcgtgacttgtatcggttttattggattcatccaacatatatcaataaaaaatgagttgtgtttcctttcttcctagttcagttaaaattatttccctcctgcgcttgtgctgtaattgtctgtgtacctgttgtttgtgactgtgttagttcccttggatatgatttcgtatttgatatgtacatggagatagcttagcttcattattggagtatgaagttagtatgacatagtcactctcctggaaaattgacactgcaaaccatatttttattctgaaccacaaatcctagtcagtccgctggcatatgccgtccgtttgctgaatccagaacgtgggtttggagatgtacggctgagatgcctctatgcgaaggggatttcgtggtgaaacgagatgggagtagagcaacgcccgtggaagatgcttcaaacttccacacttttgagcaacgatcggcagtagtaaggtagacgatttcaagatcaaagcatatgaagataaacaacatcaacaacaaaatttgttggggttctatagagagaaacagagctacatacatacactgttttgtatctaccatctgagatgatgaaaagatgaaaaactaaagaatgccccggcgccaacgccaggacacgccgcgcgcgcgtcacccgagccatctcttgacccagccggcgctgtatatttacacacgttgcagcatcgatcaccacctgttcgatcgcgtcgccgtcaccaagcttggcgcgccggtcacccggtccgggcctagaaggccacccggggctcggcgttaggcttttagtccgctaggtggctagaccgaggttaggacgctagttcactaggggcctagtggtgttttaaggatgggcaagtttgtacaaaaaagcaggctggcgccggaaccaattcagtcgagtgcggccgccagtgtgatggatatctcgacccgggtgattgcggttacatcatgtacggaaaaataattctaatccttgatttaaatttgaacttgactatttatttattctttatttcattttgtaaatcattttatgtatctcctggcaagcaattttatccaccttgcaccaacaccttcgggttccataatcaaaccaccttaacttcacaccatgctgtaactcacaccgcccagcatctccaatgtgaaagaagctaaaatttaataaacaatcatacgaagcagtgacaaaataccagatggtattaatgcttcgataaaattaattggaaagtataaaatggtagaaaataataaattataattaatttaagtaagataaaaaataattaaaaactaaaatgttaaaattttaaaaaaattattttaaataatatttaaaaacattaaaaatcattttaaaaaatttatttatagaacaattaaataaatatttcagctaataaaaaacaaaagcttacctagccttagaagacaacttgtccaacaattagatgatacccattgcccttacgttttctttaacatcaattattgtttttgtcaacaagctatcttttagttttattttattggtaaaaaatatgtcgccttcaagttgcatcatttaacacatctcgtcattagaaaaataaaactcttccctaaacgattagtagaaaaaatcattcgataataaataagaaagaaaaattagaaaaaaataacttcattttaaaaaaatcattaaggctatattttttaaatgactaattttatatagactgtaactaaaagtatacaatttattatgctatgtatcttaaagaattacttataaaaatctacggaagaatatcttacaaagtgaaaaacaaatgagaaagaatttagtgggatgattatgattttatttgaaaattgaaaaaataattattaaagactttagtggagtaagaaagctttcctattagtcttttcttatccataaaaaaaaaaaaaaaaatctagcgtgacagcttttccatagattttaataatgtaaaatactggtagcagccgaccgttcaggtaatggacactgtggtcctaacttgcaacgggtgcgggcccaatttaataacgccgtggtaacggataaagccaagcgtgaagcggtgaaggtacatctctgactccgtcaagattacgaaaccgtcaactacgaaggactccccgaaatatcatctgtgtcataaacaccaagtcacaccatacatgggcacgcgtcacaatatgattggagaacggttccaccgcatatgctataaaatgcccccacacccctcgaccctaatcgcacttcaattgcaatcaaattagttcattctctttgcgcagttccctacctctcctttcaaggttcgtagatttcttccgtttttttttcttcttctttattgtttgttctacatcagcatgatgttgatttgattgtgttttctatcgtttcatcgattataaattttcataatcagaagattcagcttttattaatgcaagaacgtccttaattgatgattttataaccgtaaattaggtctaattagagtttttttcataaagattttcagatccgtttacaacaagccttaattgttgattctgtagtcgtagattaaggtttttttcatgaactacttcagatccgttaaacaacagccttatttgttgatacttcagtcgtttttcaagaaattgttcagatccgttgataaaagccttattcgttgattctgtatggtatttcaagagatattgctcaggtcctttagcaactaccttatttgttgattctgtggccatagattaggattttttttcacgaaattgcttcttgaaattacgtgatggattttgattctgatttatcttgtgattgttgactctacagccatggcccacagcaagcacggcctgaaggaggagatgaccatgaagtaccacatggagggctgcgtgaacggccacaagttcgtgatcaccggcgagggcatcggctaccccttcaagggcaagcagaccatcaacctgtgcgtgatcgagggcggccccctgcccttcagcgaggacatcctgagcgccggcttcaagtacggcgaccggatcttcaccgagtacccccaggacatcgtggactacttcaagaacagctgccccgccggctacacctggggccggagcttcctgttcgaggacggcgccgtgtgcatctgtaacgtggacatcaccgtgagcgtgaaggagaactgcatctaccacaagagcatcttcaacggcgtgaacttccccgccgacggccccgtgatgaagaagatgaccaccaactgggaggccagctgcgagaagatcatgcccgtgcctaagcagggcatcctgaagggcgacgtgagcatgtacctgctgctgaaggacggcggccggtaccggtgccagttcgacaccgtgtacaaggccaagagcgtgcccagcaagatgcccgagtggcacttcatccagcacaagctgctgcgggaggaccggagcgacgccaagaaccagaagtggcagctgaccgagcacgccatcgccttccccagcgccctggcctgagagctcgaatttccccgatcgttcaaacatttggcaataaagtttcttaagattgaatcctgttgccggtcttgcgatgattatcatataatttctgttgaattacgttaagcatgtaataattaacatgtaatgcatgacgttatttatgagatgggtttttatgattagagtcccgcaattatacatttaatacgcgatagaaaacaaaatatagcgcgcaaactaggataaattatcgcgcgcggtgtcatctatgttactagatcgggaattctagtggccggcccagctgatatctagacccagctttcttgtacaaagtggccgttaacggatcggccagaatggcccggaccgggttaccgaattcgagctcggtaccctgggatccgatatcgatgggccctggccgaagcttggtcacccggtccgggcctagaaggccagcttcggccgccccgggcaactttattatacaaagttgatggtacggatccgtcgacggcgcgccgcggacctgaattccagcacactggcggccgttagtctaaaaacggcccctaactaacgcttagttgcccgctagattagtcccccgttagtgcctagttagacacacgacgaactaggggctactagtaacggccgccagtgtgctcggtacggccagaatggccatctggattcagcagggggtgattgcggttacatcatgtacggaaaaataattctaatccttgatttaaatttgaacttgactatttatttattctttatttcattttgtaaatcattttatgtatctcctggcaagcaattttatccaccttgcaccaacaccttcgggttccataatcaaaccaccttaacttcacaccatgctgtaactcacaccgcccagcatctccaatgtgaaagaagctaaaatttaataaacaatcatacgaagcagtgacaaaataccagatggtattaatgcttcgataaaattaattggaaagtataaaatggtagaaaataataaattataattaatttaagtaagataaaaaataattaaaaactaaaatgttaaaattttaaaaaaattattttaaataatatttaaaaacattaaaaatcattttaaaaaatttatttatagaacaattaaataaatatttcagctaataaaaaacaaaagcttacctagccttagaagacaacttgtccaacaattagatgatacccattgcccttacgttttctttaacatcaattattgtttttgtcaacaagctatcttttagttttattttattggtaaaaaatatgtcgccttcaagttgcatcatttaacacatctcgtcattagaaaaataaaactcttccctaaacgattagtagaaaaaatcattcgataataaataagaaagaaaaattagaaaaaaataacttcattttaaaaaaatcattaaggctatattttttaaatgactaattttatatagactgtaactaaaagtatacaatttattatgctatgtatcttaaagaattacttataaaaatctacggaagaatatcttacaaagtgaaaaacaaatgagaaagaatttagtgggatgattatgattttatttgaaaattgaaaaaataattattaaagactttagtggagtaagaaagctttcctattagtcttttcttatccataaaaaaaaaaaaaaaaatctagcgtgacagcttttccatagattttaataatgtaaaatactggtagcagccgaccgttcaggtaatggacactgtggtcctaacttgcaacgggtgcgggcccaatttaataacgccgtggtaacggataaagccaagcgtgaagcggtgaaggtacatctctgactccgtcaagattacgaaaccgtcaactacgaaggactccccgaaatatcatctgtgtcataaacaccaagtcacaccatacatgggcacgcgtcacaatatgattggagaacggttccaccgcatatgctataaaatgcccccacacccctcgaccctaatcgcacttcaattgcaatcaaattagttcattctctttgcgcagttccctacctctcctttcaaggttcgtagatttcttccgtttttttttcttcttctttattgtttgttctacatcagcatgatgttgatttgattgtgttttctatcgtttcatcgattataaattttcataatcagaagattcagcttttattaatgcaagaacgtccttaattgatgattttataaccgtaaattaggtctaattagagtttttttcataaagattttcagatccgtttacaacaagccttaattgttgattctgtagtcgtagattaaggtttttttcatgaactacttcagatccgttaaacaacagccttatttgttgatacttcagtcgtttttcaagaaattgttcagatccgttgataaaagccttattcgttgattctgtatggtatttcaagagatattgctcaggtcctttagcaactaccttatttgttgattctgtggccatagattaggattttttttcacgaaattgcttcttgaaattacgtgatggattttgattctgatttatcttgtgattgttgactctacagccatggctgcaactactcttacatctgctttacctggtgctttcagttcatcccagagaccaagtgctcctttcaacttacaaagatcacctagagtgcttagaaggttcaacagaaagacaggacgtcaacctcgtggacttgttcgtgctgcaaaggctcaagcggcgcaaaacctgccagagaaattcgatgaaacaagactctgggaggccctcaggggatttggggttagtccaagtagggttacttacgctcccgtcggattcggagattaccactggaccgtcacagatgaagacgggagaccttggttcgcaactgtcagtgacctcgaacacaaagagcattgcgggcagggagcacaagcagcccttaaaggactcagacaagctatggacactgccctcgcacttagagatagggacggactcagattcgtggttgctccagtggcagcaacagatgggggtggccctgtccttccccttgacgctaggtatgcactcacagtcttccctcacgtcccaggaagaacaggagagttcggacaaagactcacagaggcagagagggacagactgcttgctcttctggcagaactccacggaagaacacctcctgaaacaaccccaccagccgatatggaaccaccaggacttcctggtgttagagcagcactcgccgaaagtgaaggaccttggagtggaggaccatttgcagaacccgctagacttcttctcagagaacacgaggccacactgcacgcaagactcgctgaattcgaagccctcgtcgcaagagttaagggtcgtggagcacctcttgtcgttacccacggagaaccacacccaggcaacttgatcctcggagaggaaggctatctcctcgtggactgggatacagttggactggctccagctgaaagggatttgagtctcatctcagacgacccagctgacctcgcaagatacgcagagcttacaggaagaactccagacccagacgcactcgcactctatagactgcgttggagtctccttgatgtggctgagttcgtcgagtggttcagggctgaacaccaaagaacccaagacaccgagagtgcatggaaggggttcactgacacacttgggcaattggctgctggtggatcagctgcatagcaaacttatctctgttatgaatcagaagaagttcatgtctcgtttcatttaaaactttggtggtttgtgttttggggccttgtaaagcccctgatgaataattgttcaactatgtttccgttcctgtgttatacctttctttctaatgagtaatgacatcaaacttcttctgtattgaaattatgtccttgtgagtctctttatcatcgtttcgtctttacattatatgtgctacttttgtctaatgagcctgaaaagtggctccaatggtacgcactggaagatttgttggcttctggtagatatagcgacagtgttgagcttgtaatatcatgtctcttattgctaaattagttcctttcttaacagaaaccttcaaagtttttgtttttgttttcatttacctaatgtacacatacgctggccatgactaacaacatgtccaggcttagagcatatttttttctagcttaaattgttaacttgtcattcagtaaaatccgagaattgtgaagctctaattgaagctaattcgttttataaagtcagttaaaaagtatactaaattatccaacttttcttcaaaatctcaaaattctatgacaaaacgatagtctttgtttatgtcagtaccacaaagaggtggaaaaaaacaccaaaaaaacaataagcaaactatacactgagaagaaaaataaaagagagctcaatagatgttttatactaacggtagattagatcaaagatccaagctttactctacatagagcagaacccagaatcccttcatatctcttttattctagcaccgataatctactgaaaagaagacacttagagctctgtctctttgtcaaagaagtcccagccgtcatccagaagctccttacgttcattaacagaggccgcaattggatcgggtttacttattttgtgggtatctatacttttattagatttttaatcaggctcctgatttctttttatttcgattgaattcctgaacttgtattattcagtagatcgaataaattataaaaagataaaatcataaaataatattttatcctatcaatcatattaaagcaatgaatatgtaaaattaatcttatctttattttaaaaaatcatataggtttagtatttttttaaaaataaagataggattagttttactattcactgcttattacttttaaaaaaatcataaaggtttagtatttttttaaaataaatataggaatagttttactattcactgctttaatagaaaaatagtttaaaatttaagatagttttaatcccagcatttgccacgtttgaacgtgagccgaaacgatgtcgttacattatcttaacctagctgaaacgatgtcgtcataatatcgccaaatgccaactggactacgtcgaacccacaaatcccacaaagcgcgtgaaatcaaatcgctcaaaccacaaaaaagaacaacgcgtttgttacacgctcaatcccacgcgagtagagcacagtaaccttcaaataagcgaatggggcataatcagaaatccgaaataaacctaggggcattatcggaaatgaaaagtagctcactcaatataaaaatctaggaaccctagttttcgttatcactctgtgctccctcgctctatttctcagtctctgtgtttgcggctgaggattccgaacgagtgaccttcttcgtttctcgcaaaggtaacagcctctgctcttgtctcttcgattcgatctatgcctgtctcttatttacgatgatgtttcttcggttatgtttttttatttatgctttatgctgttgatgttcggttgtttgtttcgctttgtttttgtggttcagttttttaggattcttttggtttttgaatcgattaatcggaagagattttcgagttatttggtgtgttggaggtgaatcttttttttgaggtcatagatctgttgtatttgtgttataaacatgcgactttgtatgattttttacgaggttatgatgttctggttgttttattatgaatctgttgagacagaaccatgatttttgttgatgttcgtttacactattaaaggtttgttttaacaggattaaaagttttttaagcatgttgaaggagtcttgtagatatgtaaccgtcgatagtttttttgtgggtttgttcacatgttatcaagcttaatcttttactatgtatgcgaccatatctggatccagcaaaggcgattttttaattccttgtgaaacttttgtaatatgaagttgaaattttgttattggtaaactataaatgtgtgaagttggagtatacctttaccttcttatttggctttgtgatagtttaatttatatgtattttgagttctgacttgtatttctttgaattgattctagtttaagtaatcatggcctcctccgagaacgtcatcaccgagttcatgcgcttcaaggtgcgcatggagggcaccgtgaacggccacgagttcgagatcgagggcgagggcgagggccgcccctacgagggccacaacaccgtgaagctgaaggtgacgaagggcggccccctgcccttcgcctgggacatcctgtccccccagttccagtacggctccaaggtgtacgtgaagcaccccgccgacatccccgactacaagaagctgtccttccccgagggcttcaagtgggagcgcgtgatgaacttcgaggacggcggcgtggcgaccgtgacccaggactcctccctgcaggacggctgcttcatctacaaggtgaagttcatcggcgtgaacttcccctccgacggccccgtgatgcagaagaagaccatgggctgggaggcctccaccgagcgcctgtacccccgcgacggcgtgctgaagggcgagacccacaaggccctgaagctgaaggacggcggccactacctggtggagttcaagtccatctacatggccaagaagcccgtgcagctgcccggctactactacgtggacgccaagctggacatcacctcccacaacgaggactacaccatcgtggagcagtacgagcgcaccgagggccgccaccacctgttcctgtagttttgtgatctgatgataagtggttggttcgtgtctcatgcacttgggaggtgatctatttcacctggtgtagtttgtgtttccgtcagttggaaaaacttatccctatcgatttcgttttcattttctgcttttcttttatgtaccttcgtttgggcttgtaacgggcctttgtatttcaactctcaataataatccaagtgcatgttaaacaatttgtcatctgtttcggctttgatatactactggtgaagatgggccgtactactgcatcacaacgaaaaataataataagatgaaaaacttgaagtggaaaaaaaaaaaaacttgaatgttcactactactcattgaccataatgtttaacatacatagctcaatagtatttttgtgaatatggcaacacaaacagtccaaaacaattgtctcttactataccaaaccaagggcgccgcttgtttgccactctttgtgtgcaatagtgtgattaccacatctccacattcaatatattccctgaattatctgacgattttgatggctcactgttttcccaagtcttgaattgtcttctgtgcgccagtcaaatgcatatgtgttgagtttatcttttaaatatcaagcttttgtttttaacttttgtttgtaaccaaaaactcacagtaggagtttgatcacataattttatgtttgcctttgcaatttctagtgagtctttgattaaaagcttgaaaagaaaatgcagccaagcttaccaagtaagttatgtgtattaaccagaggaagagagaatcttgcaaaatttcaacaaacacaaaaagaagtattactacgattggtggagaaagaaaacgattccaaatcttgaactgttgttgtaaaagcatagcagaaagtgggagacaaccgaaatagaaatgactataacttaatttaatgttatcattataatttcttctagcaaatatttagaaagtaaatatcacatcaacctttaatgtaattaagctttctctttttgattcatgtgagatgaaaagaaaaaaaagaagagaaaagtgtagaaaacacatcatttctaagctgaagctgaggtacaaattaattaataagtgactagggtcacgtgaccctagtcacttatgattccgatgacttcgtaggttcctagctcaagccgctcgtgtccaagcgtcacttacgattagctaatgattacggcatctaggaccgactagttcttatgtgcttctagtctccaaatgtggttgatagttattttgctctaagatcaacagtaatgaagtataaatcatcgttgtggtgtgctactcggttaattgagcattaacacacacaaacatgacgaggatggtataatctccaaaaatgtgtactttgttaggtgggaccctatagccttgattaatgtgctatgttaggcatgcctggaaacgtgtgacgcatatgttttgtgaacctgttgatattatatgtgcttttatattaccatattttattaaaatactaatatttattactagtaagatataacattctatctagcttaaaaactaaccataaatattccataataactagatttaccaaactaatatactaaatatacataataaatacaaaattaacaagacaataatcaatatttatgagcttaatatatttagacattatggttggtcgacgataatcatgctaacttttcgtaattgcttgattgaaatatgcttagaataatgcctctttgttctacatggcaaatagggaccattatggtgtaacaccctgggaaccacaaacaccccgaaatgctactaaactacacaactaaccttcatatataaaatttcgacagcatctcctttgaaaatttgcatagacgtggaagcaacagagtataaacagatctagctagctaagtttaaacggccggccaaacgtgcaagcgctactagacaattcagtacattaaaaacgtccgcaatgtgttattaagttgtctaagcgtcaatttatttacaattgaatatatcctgcca

SEQ ID NO: 167 - DNA, 15349 bp, Artificial Sequence
  RV026525 T-DNA
caaacaaacatacacagcgatttattcacacgaacccgaattacaacggtatatatcctgtcagccaacaccaaaacatcaaaaaaatcgggatcaggatcaggatctgcggccgcatcctgcaggtttaaacggccggccttcactagctagctgctaagctcaaacgagcaggaagcaacgagagggtggcgcgcgaccgacgtgcgtacgtagcatgagcctgagtggagacgttggacgtgtatgtatatacctctctgcgtgttaactatgtacgtaagcggcaggcagtgcaataagtgtggctctgtagtatgtacgtgcgggtacgatgctgtaagctactgaggcaagtccataaataaataatgacacgtgcgtgttctataatctcttcgcttcttcatttgtccccttgcggagtttggcatccattgatgccgttacgctgagaacagacacagcagacgaaccaaaagtgagttcttgtatgaaactatgacccttcatcgctaggctcaaacagcaccccgtacgaacacagcaaattagtcatctaactattagcccctacatgtttcagacgatacataaatatagcccatccttagcaattagctattggccctgcccatcccaagcaatgatctcgaagtatttttaatatatagtatttttaatatgtagcttttaaaattagaagataattttgagacaaaaatctccaagtatttttttgggtattttttactgcctccgtttttctttatttctcgtcacctagtttaattttgtgctaatcggctataaacgaaacagagagaaaagttactctaaaagcaactccaacagattagatataaatcttatatcctgcctagagctgttaaaaagatagacaactttagtggattagtgtatgcaacaaactctccaaatttaagtatcccaactacccaacgcatatcgttcccttttcattggcgcacgaactttcacctgctatagccgacgtacatgttcgttttttttgggcggcgcttactttcttccccgttcgttctcagcatcgcaactcaatttgttatggcggagaagcccttgtatcccaggtagtaatgcacagatatgcattattattattcataaaatcgagctagttaccctatgaggtgacatgaagcgctcacggttactatgacggttagcttcacgactgttggtggcagtagcgtacgacttagctatagttccggacttacctaactgactagagtcacacttagctgaccctagtcacttaggcgcgccaagcttggatctcctgcaggatctggccggccggatgggcggatctcgtacctcaactttgtatagaaaagttgggccagaatggcccggaccgggttaccaagcggccgcgaattccagaagaccaaagggcaattgagacttttcaacaaagggtaatatcgggaaacctcctcggattccattgcccagctatctgtcacttcatcaaaaggacagtagaaaaggaaggtggcacctacaaatgccatcattgcgataaaggaaaggctatcgttcaagatgcctctgccgacagtggtcccaaagatggacccccacccacgaggagcatcgtggaaaaagaagacgttccaaccacgtcttcaaagcaagtggattgatgtgatatctccactgacgtaagggatgacgcacaatcccactatccttcgcaagacccttcctctatataaggaagttcatttcatttggagaggacccatggaatctgctgaaagaatcggttcttacgatgtttacagacaaccatcttctaccagatggaacccaacctctgaacaactttctatccttagagaactttactacaccaacggtatcagatctccaaccgttgatgaaatccatagaatctctatgaagctttctagatacggtaagatcgaaggtaagaacgttttttactggtttcaaaaccataaggctagacatagacaaaagaccagactttctgctatgaacgttggtaagccagctgcttctccagctctttctcaaaccaccagaaagcataagcaatgctacatcaccaccaacatcgttcttacccttaaccaacattgctacaccaagaccaacatggttcttcaaatcatctggtctcttggtcttggtaacaagtctcaaaccaccaagatggtttgggaaatcaagatcaccgcttttccaaccatccataccgaatctttttacgaaaacagaatggctggtgaaaactcttcttgcaaggaagctgcttgctgctctcttgaacaaatgtacgctgttaagcatcatgatgttatgaaggctatggaagaaaaccaacttcaagaaggtaagatcaacagacatgttgaaacccttgaactttttccaacccattgcgaagatagatctccagaaccatctgaaaagaagtcttgctgctggggttcttgcgaaaccaaggaaaaccataacaacaacccaccaggtggttacaagggtaagcaaagagattctgttcttgatctttgcctttctcttggtaacaagtcttgcggtcttcatgataactaaggtacctgacatcttatagtctgcaacctctcgtgtctgaattcctatctttatcaagtgttattgcttccacgactataggacagctttcgtcgaaaggttttgctcatgtgatctcgaaggattcatctagtctgatttttcgtgacttgtatcggttttattggattcatccaacatatatcaataaaaaatgagttgtgtttcctttcttcctagttcagttaaaattatttccctcctgcgcttgtgctgtaattgtctgtgtacctgttgtttgtgactgtgttagttcccttggatatgatttcgtatttgatatgtacatggagatagcttagcttcattattggagtatgaagttagtatgacatagtcactctcctggaaaattgacactgcaaaccatatttttattctgaaccacaaatcctagtcagtccgctggcatatgccgtccgtttgctgaatccagaacgtgggtttggagatgtacggctgagatgcctctatgcgaaggggatttcgtggtgaaacgagatgggagtagagcaacgcccgtggaagatgcttcaaacttccacacttttgagcaacgatcggcagtagtaaggtagacgatttcaagatcaaagcatatgaagataaacaacatcaacaacaaaatttgttggggttctatagagagaaacagagctacatacatacactgttttgtatctaccatctgagatgatgaaaagatgaaaaactaaagaatgccccggcgccaacgccaggacacgccgcgcgcgcgtcacccgagccatctcttgacccagccggcgctgtatatttacacacgttgcagcatcgatcaccacctgttcgatcgcgtcgccgtcaccaagcttggcgcgccggtcacccggtccgggcctagaaggccacccggggctcggcgttaggcttttagtccgctaggtggctagaccgaggttaggacgctagttcactaggggcctagtggtgttttaaggatgggcaagtttgtacaaaaaagcaggctggcgccggaaccaattcagtcgagtgcggccgccagtgtgatggatatctcgacccgggtgattgcggttacatcatgtacggaaaaataattctaatccttgatttaaatttgaacttgactatttatttattctttatttcattttgtaaatcattttatgtatctcctggcaagcaattttatccaccttgcaccaacaccttcgggttccataatcaaaccaccttaacttcacaccatgctgtaactcacaccgcccagcatctccaatgtgaaagaagctaaaatttaataaacaatcatacgaagcagtgacaaaataccagatggtattaatgcttcgataaaattaattggaaagtataaaatggtagaaaataataaattataattaatttaagtaagataaaaaataattaaaaactaaaatgttaaaattttaaaaaaattattttaaataatatttaaaaacattaaaaatcattttaaaaaatttatttatagaacaattaaataaatatttcagctaataaaaaacaaaagcttacctagccttagaagacaacttgtccaacaattagatgatacccattgcccttacgttttctttaacatcaattattgtttttgtcaacaagctatcttttagttttattttattggtaaaaaatatgtcgccttcaagttgcatcatttaacacatctcgtcattagaaaaataaaactcttccctaaacgattagtagaaaaaatcattcgataataaataagaaagaaaaattagaaaaaaataacttcattttaaaaaaatcattaaggctatattttttaaatgactaattttatatagactgtaactaaaagtatacaatttattatgctatgtatcttaaagaattacttataaaaatctacggaagaatatcttacaaagtgaaaaacaaatgagaaagaatttagtgggatgattatgattttatttgaaaattgaaaaaataattattaaagactttagtggagtaagaaagctttcctattagtcttttcttatccataaaaaaaaaaaaaaaaatctagcgtgacagcttttccatagattttaataatgtaaaatactggtagcagccgaccgttcaggtaatggacactgtggtcctaacttgcaacgggtgcgggcccaatttaataacgccgtggtaacggataaagccaagcgtgaagcggtgaaggtacatctctgactccgtcaagattacgaaaccgtcaactacgaaggactccccgaaatatcatctgtgtcataaacaccaagtcacaccatacatgggcacgcgtcacaatatgattggagaacggttccaccgcatatgctataaaatgcccccacacccctcgaccctaatcgcacttcaattgcaatcaaattagttcattctctttgcgcagttccctacctctcctttcaaggttcgtagatttcttccgtttttttttcttcttctttattgtttgttctacatcagcatgatgttgatttgattgtgttttctatcgtttcatcgattataaattttcataatcagaagattcagcttttattaatgcaagaacgtccttaattgatgattttataaccgtaaattaggtctaattagagtttttttcataaagattttcagatccgtttacaacaagccttaattgttgattctgtagtcgtagattaaggtttttttcatgaactacttcagatccgttaaacaacagccttatttgttgatacttcagtcgtttttcaagaaattgttcagatccgttgataaaagccttattcgttgattctgtatggtatttcaagagatattgctcaggtcctttagcaactaccttatttgttgattctgtggccatagattaggattttttttcacgaaattgcttcttgaaattacgtgatggattttgattctgatttatcttgtgattgttgactctacagccatggcccacagcaagcacggcctgaaggaggagatgaccatgaagtaccacatggagggctgcgtgaacggccacaagttcgtgatcaccggcgagggcatcggctaccccttcaagggcaagcagaccatcaacctgtgcgtgatcgagggcggccccctgcccttcagcgaggacatcctgagcgccggcttcaagtacggcgaccggatcttcaccgagtacccccaggacatcgtggactacttcaagaacagctgccccgccggctacacctggggccggagcttcctgttcgaggacggcgccgtgtgcatctgtaacgtggacatcaccgtgagcgtgaaggagaactgcatctaccacaagagcatcttcaacggcgtgaacttccccgccgacggccccgtgatgaagaagatgaccaccaactgggaggccagctgcgagaagatcatgcccgtgcctaagcagggcatcctgaagggcgacgtgagcatgtacctgctgctgaaggacggcggccggtaccggtgccagttcgacaccgtgtacaaggccaagagcgtgcccagcaagatgcccgagtggcacttcatccagcacaagctgctgcgggaggaccggagcgacgccaagaaccagaagtggcagctgaccgagcacgccatcgccttccccagcgccctggcctgagagctcgaatttccccgatcgttcaaacatttggcaataaagtttcttaagattgaatcctgttgccggtcttgcgatgattatcatataatttctgttgaattacgttaagcatgtaataattaacatgtaatgcatgacgttatttatgagatgggtttttatgattagagtcccgcaattatacatttaatacgcgatagaaaacaaaatatagcgcgcaaactaggataaattatcgcgcgcggtgtcatctatgttactagatcgggaattctagtggccggcccagctgatatctagacccagctttcttgtacaaagtggccgttaacggatcggccagaatggcccggaccgggttaccgaattcgagctcggtaccctgggatccgatatcgatgggccctggccgaagcttggtcacccggtccgggcctagaaggccagcttcggccgccccgggcaactttattatacaaagttgatggtacggatccgtcgacggcgcgccgcggacctgaattccagcacactggcggccgttagtctaaaaacggcccctaactaacgcttagttgcccgctagattagtcccccgttagtgcctagttagacacacgacgaactaggggctactagtaacggccgccagtgtgctcggtacggccagaatggccatctggattcagcagggggtgattgcggttacatcatgtacggaaaaataattctaatccttgatttaaatttgaacttgactatttatttattctttatttcattttgtaaatcattttatgtatctcctggcaagcaattttatccaccttgcaccaacaccttcgggttccataatcaaaccaccttaacttcacaccatgctgtaactcacaccgcccagcatctccaatgtgaaagaagctaaaatttaataaacaatcatacgaagcagtgacaaaataccagatggtattaatgcttcgataaaattaattggaaagtataaaatggtagaaaataataaattataattaatttaagtaagataaaaaataattaaaaactaaaatgttaaaattttaaaaaaattattttaaataatatttaaaaacattaaaaatcattttaaaaaatttatttatagaacaattaaataaatatttcagctaataaaaaacaaaagcttacctagccttagaagacaacttgtccaacaattagatgatacccattgcccttacgttttctttaacatcaattattgtttttgtcaacaagctatcttttagttttattttattggtaaaaaatatgtcgccttcaagttgcatcatttaacacatctcgtcattagaaaaataaaactcttccctaaacgattagtagaaaaaatcattcgataataaataagaaagaaaaattagaaaaaaataacttcattttaaaaaaatcattaaggctatattttttaaatgactaattttatatagactgtaactaaaagtatacaatttattatgctatgtatcttaaagaattacttataaaaatctacggaagaatatcttacaaagtgaaaaacaaatgagaaagaatttagtgggatgattatgattttatttgaaaattgaaaaaataattattaaagactttagtggagtaagaaagctttcctattagtcttttcttatccataaaaaaaaaaaaaaaaatctagcgtgacagcttttccatagattttaataatgtaaaatactggtagcagccgaccgttcaggtaatggacactgtggtcctaacttgcaacgggtgcgggcccaatttaataacgccgtggtaacggataaagccaagcgtgaagcggtgaaggtacatctctgactccgtcaagattacgaaaccgtcaactacgaaggactccccgaaatatcatctgtgtcataaacaccaagtcacaccatacatgggcacgcgtcacaatatgattggagaacggttccaccgcatatgctataaaatgcccccacacccctcgaccctaatcgcacttcaattgcaatcaaattagttcattctctttgcgcagttccctacctctcctttcaaggttcgtagatttcttccgtttttttttcttcttctttattgtttgttctacatcagcatgatgttgatttgattgtgttttctatcgtttcatcgattataaattttcataatcagaagattcagcttttattaatgcaagaacgtccttaattgatgattttataaccgtaaattaggtctaattagagtttttttcataaagattttcagatccgtttacaacaagccttaattgttgattctgtagtcgtagattaaggtttttttcatgaactacttcagatccgttaaacaacagccttatttgttgatacttcagtcgtttttcaagaaattgttcagatccgttgataaaagccttattcgttgattctgtatggtatttcaagagatattgctcaggtcctttagcaactaccttatttgttgattctgtggccatagattaggattttttttcacgaaattgcttcttgaaattacgtgatggattttgattctgatttatcttgtgattgttgactctacagccatggctgcaactactcttacatctgctttacctggtgctttcagttcatcccagagaccaagtgctcctttcaacttacaaagatcacctagagtgcttagaaggttcaacagaaagacaggacgtcaacctcgtggacttgttcgtgctgcaaaggctcaagcggcgcaaaacctgccagagaaattcgatgaaacaagactctgggaggccctcaggggatttggggttagtccaagtagggttacttacgctcccgtcggattcggagattaccactggaccgtcacagatgaagacgggagaccttggttcgcaactgtcagtgacctcgaacacaaagagcattgcgggcagggagcacaagcagcccttaaaggactcagacaagctatggacactgccctcgcacttagagatagggacggactcagattcgtggttgctccagtggcagcaacagatgggggtggccctgtccttccccttgacgctaggtatgcactcacagtcttccctcacgtcccaggaagaacaggagagttcggacaaagactcacagaggcagagagggacagactgcttgctcttctggcagaactccacggaagaacacctcctgaaacaaccccaccagccgatatggaaccaccaggacttcctggtgttagagcagcactcgccgaaagtgaaggaccttggagtggaggaccatttgcagaacccgctagacttcttctcagagaacacgaggccacactgcacgcaagactcgctgaattcgaagccctcgtcgcaagagttaagggtcgtggagcacctcttgtcgttacccacggagaaccacacccaggcaacttgatcctcggagaggaaggctatctcctcgtggactgggatacagttggactggctccagctgaaagggatttgagtctcatctcagacgacccagctgacctcgcaagatacgcagagcttacaggaagaactccagacccagacgcactcgcactctatagactgcgttggagtctccttgatgtggctgagttcgtcgagtggttcagggctgaacaccaaagaacccaagacaccgagagtgcatggaaggggttcactgacacacttgggcaattggctgctggtggatcagctgcatagcaaacttatctctgttatgaatcagaagaagttcatgtctcgtttcatttaaaactttggtggtttgtgttttggggccttgtaaagcccctgatgaataattgttcaactatgtttccgttcctgtgttatacctttctttctaatgagtaatgacatcaaacttcttctgtattgaaattatgtccttgtgagtctctttatcatcgtttcgtctttacattatatgtgctacttttgtctaatgagcctgaaaagtggctccaatggtacgcactggaagatttgttggcttctggtagatatagcgacagtgttgagcttgtaatatcatgtctcttattgctaaattagttcctttcttaacagaaaccttcaaagtttttgtttttgttttcatttacctaatgtacacatacgctggccatgactaacaacatgtccaggcttagagcatatttttttctagcttaaattgttaacttgtcattcagtaaaatccgagaattgtgaagctctaattgaagctaattcgttttataaagtcagttaaaaagtatactaaattatccaacttttcttcaaaatctcaaaattctatgacaaaacgatagtctttgtttatgtcagtaccacaaagaggtggaaaaaaacaccaaaaaaacaataagcaaactatacactgagaagaaaaataaaagagagctcaatagatgttttatactaacggtagattagatcaaagatccaagctttactctacatagagcagaacccagaatcccttcatatctcttttattctagcaccgataatctactgaaaagaagacacttagagctctgtctctttgtcaaagaagtcccagccgtcatccagaagctccttacgttcattaacagaggccgcaattggatcgggtttacttattttgtgggtatctatacttttattagatttttaatcaggctcctgatttctttttatttcgattgaattcctgaacttgtattattcagtagatcgaataaattataaaaagataaaatcataaaataatattttatcctatcaatcatattaaagcaatgaatatgtaaaattaatcttatctttattttaaaaaatcatataggtttagtatttttttaaaaataaagataggattagttttactattcactgcttattacttttaaaaaaatcataaaggtttagtatttttttaaaataaatataggaatagttttactattcactgctttaatagaaaaatagtttaaaatttaagatagttttaatcccagcatttgccacgtttgaacgtgagccgaaacgatgtcgttacattatcttaacctagctgaaacgatgtcgtcataatatcgccaaatgccaactggactacgtcgaacccacaaatcccacaaagcgcgtgaaatcaaatcgctcaaaccacaaaaaagaacaacgcgtttgttacacgctcaatcccacgcgagtagagcacagtaaccttcaaataagcgaatggggcataatcagaaatccgaaataaacctaggggcattatcggaaatgaaaagtagctcactcaatataaaaatctaggaaccctagttttcgttatcactctgtgctccctcgctctatttctcagtctctgtgtttgcggctgaggattccgaacgagtgaccttcttcgtttctcgcaaaggtaacagcctctgctcttgtctcttcgattcgatctatgcctgtctcttatttacgatgatgtttcttcggttatgtttttttatttatgctttatgctgttgatgttcggttgtttgtttcgctttgtttttgtggttcagttttttaggattcttttggtttttgaatcgattaatcggaagagattttcgagttatttggtgtgttggaggtgaatcttttttttgaggtcatagatctgttgtatttgtgttataaacatgcgactttgtatgattttttacgaggttatgatgttctggttgttttattatgaatctgttgagacagaaccatgatttttgttgatgttcgtttacactattaaaggtttgttttaacaggattaaaagttttttaagcatgttgaaggagtcttgtagatatgtaaccgtcgatagtttttttgtgggtttgttcacatgttatcaagcttaatcttttactatgtatgcgaccatatctggatccagcaaaggcgattttttaattccttgtgaaacttttgtaatatgaagttgaaattttgttattggtaaactataaatgtgtgaagttggagtatacctttaccttcttatttggctttgtgatagtttaatttatatgtattttgagttctgacttgtatttctttgaattgattctagtttaagtaatcatggcctcctccgagaacgtcatcaccgagttcatgcgcttcaaggtgcgcatggagggcaccgtgaacggccacgagttcgagatcgagggcgagggcgagggccgcccctacgagggccacaacaccgtgaagctgaaggtgacgaagggcggccccctgcccttcgcctgggacatcctgtccccccagttccagtacggctccaaggtgtacgtgaagcaccccgccgacatccccgactacaagaagctgtccttccccgagggcttcaagtgggagcgcgtgatgaacttcgaggacggcggcgtggcgaccgtgacccaggactcctccctgcaggacggctgcttcatctacaaggtgaagttcatcggcgtgaacttcccctccgacggccccgtgatgcagaagaagaccatgggctgggaggcctccaccgagcgcctgtacccccgcgacggcgtgctgaagggcgagacccacaaggccctgaagctgaaggacggcggccactacctggtggagttcaagtccatctacatggccaagaagcccgtgcagctgcccggctactactacgtggacgccaagctggacatcacctcccacaacgaggactacaccatcgtggagcagtacgagcgcaccgagggccgccaccacctgttcctgtagttttgtgatctgatgataagtggttggttcgtgtctcatgcacttgggaggtgatctatttcacctggtgtagtttgtgtttccgtcagttggaaaaacttatccctatcgatttcgttttcattttctgcttttcttttatgtaccttcgtttgggcttgtaacgggcctttgtatttcaactctcaataataatccaagtgcatgttaaacaatttgtcatctgtttcggctttgatatactactggtgaagatgggccgtactactgcatcacaacgaaaaataataataagatgaaaaacttgaagtggaaaaaaaaaaaaacttgaatgttcactactactcattgaccataatgtttaacatacatagctcaatagtatttttgtgaatatggcaacacaaacagtccaaaacaattgtctcttactataccaaaccaagggcgccgcttgtttgccactctttgtgtgcaatagtgtgattaccacatctccacattcaatatattccctgaattatctgacgattttgatggctcactgttttcccaagtcttgaattgtcttctgtgcgccagtcaaatgcatatgtgttgagtttatcttttaaatatcaagcttttgtttttaacttttgtttgtaaccaaaaactcacagtaggagtttgatcacataattttatgtttgcctttgcaatttctagtgagtctttgattaaaagcttgaaaagaaaatgcagccaagcttaccaagtaagttatgtgtattaaccagaggaagagagaatcttgcaaaatttcaacaaacacaaaaagaagtattactacgattggtggagaaagaaaacgattccaaatcttgaactgttgttgtaaaagcatagcagaaagtgggagacaaccgaaatagaaatgactataacttaatttaatgttatcattataatttcttctagcaaatatttagaaagtaaatatcacatcaacctttaatgtaattaagctttctctttttgattcatgtgagatgaaaagaaaaaaaagaagagaaaagtgtagaaaacacatcatttctaagctgaagctgaggtacaaattaattaataagtgactagggtcacgtgaccctagtcacttatgattccgatgacttcgtaggttcctagctcaagccgctcgtgtccaagcgtcacttacgattagctaatgattacggcatctaggaccgactagttcttatgtgcttctagtctccaaatgtggttgatagttattttgctctaagatcaacagtaatgaagtataaatcatcgttgtggtgtgctactcggttaattgagcattaacacacacaaacatgacgaggatggtataatctccaaaaatgtgtactttgttaggtgggaccctatagccttgattaatgtgctatgttaggcatgcctggaaacgtgtgacgcatatgttttgtgaacctgttgatattatatgtgcttttatattaccatattttattaaaatactaatatttattactagtaagatataacattctatctagcttaaaaactaaccataaatattccataataactagatttaccaaactaatatactaaatatacataataaatacaaaattaacaagacaataatcaatatttatgagcttaatatatttagacattatggttggtcgacgataatcatgctaacttttcgtaattgcttgattgaaatatgcttagaataatgcctctttgttctacatggcaaatagggaccattatggtgtaacaccctgggaaccacaaacaccccgaaatgctactaaactacacaactaaccttcatatataaaatttcgacagcatctcctttgaaaatttgcatagacgtggaagcaacagagtataaacagatctagctagctaagtttaaacggccggccaaacgtgcaagcgctactagacaattcagtacattaaaaacgtccgcaatgtgttattaagttgtctaagcgtcaatttatttacaattgaatatatcctgcca

SEQ ID NO: 168 - DNA, 11996 bp, Artificial Sequence
  RV022814 T-DNA
caaacaaacatacacagcgatttattcacacgaacccgaattacaacggtatatatcctgtcagccaacaccaaaacatcaaaaaaatcgggatcaggatcaggatctgcggccgcatcctgcaggtttaaacggccggccttcactagctagctgctaagctcaaacgagcaggaagcaacgagagggtggcgcgcgaccgacgtgcgtacgtagcatgagcctgagtggagacgttggacgtgtatgtatatacctctctgcgtgttaactatgtacgtaagcggcaggcagtgcaataagtgtggctctgtagtatgtacgtgcgggtacgatgctgtaagctactgaggcaagtccataaataaataatgacacgtgcgtgttctataatctcttcgcttcttcatttgtccccttgcggagtttggcatccattgatgccgttacgctgagaacagacacagcagacgaaccaaaagtgagttcttgtatgaaactatgacccttcatcgctaggctcaaacagcaccccgtacgaacacagcaaattagtcatctaactattagcccctacatgtttcagacgatacataaatatagcccatccttagcaattagctattggccctgcccatcccaagcaatgatctcgaagtatttttaatatatagtatttttaatatgtagcttttaaaattagaagataattttgagacaaaaatctccaagtatttttttgggtattttttactgcctccgtttttctttatttctcgtcacctagtttaattttgtgctaatcggctataaacgaaacagagagaaaagttactctaaaagcaactccaacagattagatataaatcttatatcctgcctagagctgttaaaaagatagacaactttagtggattagtgtatgcaacaaactctccaaatttaagtatcccaactacccaacgcatatcgttcccttttcattggcgcacgaactttcacctgctatagccgacgtacatgttcgttttttttgggcggcgcttactttcttccccgttcgttctcagcatcgcaactcaatttgttatggcggagaagcccttgtatcccaggtagtaatgcacagatatgcattattattattcataaaatcgagctagttaccctatgaggtgacatgaagcgctcacggttactatgacggttagcttcacgactgttggtggcagtagcgtacgacttagctatagttccggacttacctaactgactagagtcacacttagctgaccctagtcacttaggcgcgccaagcttggatctcctgcaggatctggccggccggatgggcggatctcgtacctcaactttgtatagaaaagttgaacgagaaacgtaaaatgatataaatatcaatatattaaattagattttgcataaaaaacagactacataatactgtaaaacacaacatatccagtcactatggtcgaccgacagccttccaaatgttcttctcaaacggaatcgtcgtatccagcctactcgctattgtcctcaatgccgtattaaatcataaaaagaaataagaaaaagaggtgcgagcctcttttttgtgtgacaaaataaaaacatctacctattcatatacgctagtgtcatagtcctgaaaatcatctgcatcaagaacaatttcacaactcttatacttttctcttacaagtcgttcggcttcatctggattttcagcctctatacttactaaacgtgataaagtttctgtaatttctactgtatcgacctgcagactggctgtgtataagggagcctgacatttatattccccagaacatcaggttaatggcgtttttgatgtcattttcgcggtggctgagatcagccacttcttccccgataacggagaccggcacactggccatatcggtggtcatcatgcgccagctttcatccccgatatgcaccaccgggtaaagttcacgggagactttatctgacagcagacgtgcactggccagggggatcaccatccgtcgcccgggcgtgtcaataatatcactctgtacatccacaaacagacgataacggctctctcttttataggtgtaaaccttaaactgcatttcaccagcccctgttctcgtcagcaaaagagccgttcatttcaataaaccgggcgacctcagccatcccttcctgattttccgctttccagcgttcggcacgcagacgacgggcttcattctgcatggttgtgcttaccagaccggagatattgacatcatatatgccttgagcaactgatagctgtcgctgtcaactgtcactgtaatacgctgcttcatagcatacctctttttgacatacttcgggtatacatatcagtatatattcttataccgcaaaaatcagcgcgcaaatacgcatactgttatctggcttttagtaagccggatccacgcggcgtttacgccccccctgccactcatcgcagtactgttgtaattcattaagcattctgccgacatggaagccatcacaaacggcatgatgaacctgaatcgccagcggcatcagcaccttgtcgccttgcgtataatatttgcccatggtgaaaacgggggcgaagaagttgtccatattggccacgtttaaatcaaaactggtgaaactcacccagggattggctgagacgaaaaacatattctcaataaaccctttagggaaataggccaggttttcaccgtaacacgccacatcttgcgaatatatgtgtagaaactgccggaaatcgtcgtggtattcactccagagcgatgaaaacgtttcagtttgctcatggaaaacggtgtaacaagggtgaacactatcccatatcaccagctcaccgtctttcattgccatacggaattccggatgagcattcatcaggcgggcaagaatgtgaataaaggccggataaaacttgtgcttatttttctttacggtctttaaaaaggccgtaatatccagctgaacggtctggttataggtacattgagcaactgactgaaatgcctcaaaatgttctttacgatgccattgggatatatcaacggtggtatatccagtgatttttttctccattttagcttccttagctcctgaaaatctcgataactcaaaaaatacgcccggtagtgatcttatttcattatggtgaaagttggaacctcttacgtgccgatcaacgtctcattttcgccaaaagttggcccagggcttcccggtatcaacagggacaccaggatttatttattctgcgaagtgatcttccgtcacaggtatttattcggcgcaaagtgcgtcgggtgatgctgccaacttacggccgccatagtgactggatatgttgtgttttacagtattatgtagtctgttttttatgcaaaatctaatttaatatattgatatttatatcattttacgtttctcgttcaactttattatacaaagttgatggtacggatccgtcgacggcgcgccgcggacctgaattccagcacactggcggccgttagtctaaaaacggcccctaactaacgcttagttgcccgctagattagtcccccgttagtgcctagttagacacacgacgaactaggggctactagtaacggccgccagtgtgctcggtacggccagaatggccatctggattcagcagggggtgattgcggttacatcatgtacggaaaaataattctaatccttgatttaaatttgaacttgactatttatttattctttatttcattttgtaaatcattttatgtatctcctggcaagcaattttatccaccttgcaccaacaccttcgggttccataatcaaaccaccttaacttcacaccatgctgtaactcacaccgcccagcatctccaatgtgaaagaagctaaaatttaataaacaatcatacgaagcagtgacaaaataccagatggtattaatgcttcgataaaattaattggaaagtataaaatggtagaaaataataaattataattaatttaagtaagataaaaaataattaaaaactaaaatgttaaaattttaaaaaaattattttaaataatatttaaaaacattaaaaatcattttaaaaaatttatttatagaacaattaaataaatatttcagctaataaaaaacaaaagcttacctagccttagaagacaacttgtccaacaattagatgatacccattgcccttacgttttctttaacatcaattattgtttttgtcaacaagctatcttttagttttattttattggtaaaaaatatgtcgccttcaagttgcatcatttaacacatctcgtcattagaaaaataaaactcttccctaaacgattagtagaaaaaatcattcgataataaataagaaagaaaaattagaaaaaaataacttcattttaaaaaaatcattaaggctatattttttaaatgactaattttatatagactgtaactaaaagtatacaatttattatgctatgtatcttaaagaattacttataaaaatctacggaagaatatcttacaaagtgaaaaacaaatgagaaagaatttagtgggatgattatgattttatttgaaaattgaaaaaataattattaaagactttagtggagtaagaaagctttcctattagtcttttcttatccataaaaaaaaaaaaaaaaatctagcgtgacagcttttccatagattttaataatgtaaaatactggtagcagccgaccgttcaggtaatggacactgtggtcctaacttgcaacgggtgcgggcccaatttaataacgccgtggtaacggataaagccaagcgtgaagcggtgaaggtacatctctgactccgtcaagattacgaaaccgtcaactacgaaggactccccgaaatatcatctgtgtcataaacaccaagtcacaccatacatgggcacgcgtcacaatatgattggagaacggttccaccgcatatgctataaaatgcccccacacccctcgaccctaatcgcacttcaattgcaatcaaattagttcattctctttgcgcagttccctacctctcctttcaaggttcgtagatttcttccgtttttttttcttcttctttattgtttgttctacatcagcatgatgttgatttgattgtgttttctatcgtttcatcgattataaattttcataatcagaagattcagcttttattaatgcaagaacgtccttaattgatgattttataaccgtaaattaggtctaattagagtttttttcataaagattttcagatccgtttacaacaagccttaattgttgattctgtagtcgtagattaaggtttttttcatgaactacttcagatccgttaaacaacagccttatttgttgatacttcagtcgtttttcaagaaattgttcagatccgttgataaaagccttattcgttgattctgtatggtatttcaagagatattgctcaggtcctttagcaactaccttatttgttgattctgtggccatagattaggattttttttcacgaaattgcttcttgaaattacgtgatggattttgattctgatttatcttgtgattgttgactctacagccatggctgcaactactcttacatctgctttacctggtgctttcagttcatcccagagaccaagtgctcctttcaacttacaaagatcacctagagtgcttagaaggttcaacagaaagacaggacgtcaacctcgtggacttgttcgtgctgcaaaggctcaagcggcgcaaaacctgccagagaaattcgatgaaacaagactctgggaggccctcaggggatttggggttagtccaagtagggttacttacgctcccgtcggattcggagattaccactggaccgtcacagatgaagacgggagaccttggttcgcaactgtcagtgacctcgaacacaaagagcattgcgggcagggagcacaagcagcccttaaaggactcagacaagctatggacactgccctcgcacttagagatagggacggactcagattcgtggttgctccagtggcagcaacagatgggggtggccctgtccttccccttgacgctaggtatgcactcacagtcttccctcacgtcccaggaagaacaggagagttcggacaaagactcacagaggcagagagggacagactgcttgctcttctggcagaactccacggaagaacacctcctgaaacaaccccaccagccgatatggaaccaccaggacttcctggtgttagagcagcactcgccgaaagtgaaggaccttggagtggaggaccatttgcagaacccgctagacttcttctcagagaacacgaggccacactgcacgcaagactcgctgaattcgaagccctcgtcgcaagagttaagggtcgtggagcacctcttgtcgttacccacggagaaccacacccaggcaacttgatcctcggagaggaaggctatctcctcgtggactgggatacagttggactggctccagctgaaagggatttgagtctcatctcagacgacccagctgacctcgcaagatacgcagagcttacaggaagaactccagacccagacgcactcgcactctatagactgcgttggagtctccttgatgtggctgagttcgtcgagtggttcagggctgaacaccaaagaacccaagacaccgagagtgcatggaaggggttcactgacacacttgggcaattggctgctggtggatcagctgcatagcaaacttatctctgttatgaatcagaagaagttcatgtctcgtttcatttaaaactttggtggtttgtgttttggggccttgtaaagcccctgatgaataattgttcaactatgtttccgttcctgtgttatacctttctttctaatgagtaatgacatcaaacttcttctgtattgaaattatgtccttgtgagtctctttatcatcgtttcgtctttacattatatgtgctacttttgtctaatgagcctgaaaagtggctccaatggtacgcactggaagatttgttggcttctggtagatatagcgacagtgttgagcttgtaatatcatgtctcttattgctaaattagttcctttcttaacagaaaccttcaaagtttttgtttttgttttcatttacctaatgtacacatacgctggccatgactaacaacatgtccaggcttagagcatatttttttctagcttaaattgttaacttgtcattcagtaaaatccgagaattgtgaagctctaattgaagctaattcgttttataaagtcagttaaaaagtatactaaattatccaacttttcttcaaaatctcaaaattctatgacaaaacgatagtctttgtttatgtcagtaccacaaagaggtggaaaaaaacaccaaaaaaacaataagcaaactatacactgagaagaaaaataaaagagagctcaatagatgttttatactaacggtagattagatcaaagatccaagctttactctacatagagcagaacccagaatcccttcatatctcttttattctagcaccgataatctactgaaaagaagacacttagagctctgtctctttgtcaaagaagtcccagccgtcatccagaagctccttacgttcattaacagaggccgcaattggatcgggtttacttattttgtgggtatctatacttttattagatttttaatcaggctcctgatttctttttatttcgattgaattcctgaacttgtattattcagtagatcgaataaattataaaaagataaaatcataaaataatattttatcctatcaatcatattaaagcaatgaatatgtaaaattaatcttatctttattttaaaaaatcatataggtttagtatttttttaaaaataaagataggattagttttactattcactgcttattacttttaaaaaaatcataaaggtttagtatttttttaaaataaatataggaatagttttactattcactgctttaatagaaaaatagtttaaaatttaagatagttttaatcccagcatttgccacgtttgaacgtgagccgaaacgatgtcgttacattatcttaacctagctgaaacgatgtcgtcataatatcgccaaatgccaactggactacgtcgaacccacaaatcccacaaagcgcgtgaaatcaaatcgctcaaaccacaaaaaagaacaacgcgtttgttacacgctcaatcccacgcgagtagagcacagtaaccttcaaataagcgaatggggcataatcagaaatccgaaataaacctaggggcattatcggaaatgaaaagtagctcactcaatataaaaatctaggaaccctagttttcgttatcactctgtgctccctcgctctatttctcagtctctgtgtttgcggctgaggattccgaacgagtgaccttcttcgtttctcgcaaaggtaacagcctctgctcttgtctcttcgattcgatctatgcctgtctcttatttacgatgatgtttcttcggttatgtttttttatttatgctttatgctgttgatgttcggttgtttgtttcgctttgtttttgtggttcagttttttaggattcttttggtttttgaatcgattaatcggaagagattttcgagttatttggtgtgttggaggtgaatcttttttttgaggtcatagatctgttgtatttgtgttataaacatgcgactttgtatgattttttacgaggttatgatgttctggttgttttattatgaatctgttgagacagaaccatgatttttgttgatgttcgtttacactattaaaggtttgttttaacaggattaaaagttttttaagcatgttgaaggagtcttgtagatatgtaaccgtcgatagtttttttgtgggtttgttcacatgttatcaagcttaatcttttactatgtatgcgaccatatctggatccagcaaaggcgattttttaattccttgtgaaacttttgtaatatgaagttgaaattttgttattggtaaactataaatgtgtgaagttggagtatacctttaccttcttatttggctttgtgatagtttaatttatatgtattttgagttctgacttgtatttctttgaattgattctagtttaagtaatcatggcctcctccgagaacgtcatcaccgagttcatgcgcttcaaggtgcgcatggagggcaccgtgaacggccacgagttcgagatcgagggcgagggcgagggccgcccctacgagggccacaacaccgtgaagctgaaggtgacgaagggcggccccctgcccttcgcctgggacatcctgtccccccagttccagtacggctccaaggtgtacgtgaagcaccccgccgacatccccgactacaagaagctgtccttccccgagggcttcaagtgggagcgcgtgatgaacttcgaggacggcggcgtggcgaccgtgacccaggactcctccctgcaggacggctgcttcatctacaaggtgaagttcatcggcgtgaacttcccctccgacggccccgtgatgcagaagaagaccatgggctgggaggcctccaccgagcgcctgtacccccgcgacggcgtgctgaagggcgagacccacaaggccctgaagctgaaggacggcggccactacctggtggagttcaagtccatctacatggccaagaagcccgtgcagctgcccggctactactacgtggacgccaagctggacatcacctcccacaacgaggactacaccatcgtggagcagtacgagcgcaccgagggccgccaccacctgttcctgtagttttgtgatctgatgataagtggttggttcgtgtctcatgcacttgggaggtgatctatttcacctggtgtagtttgtgtttccgtcagttggaaaaacttatccctatcgatttcgttttcattttctgcttttcttttatgtaccttcgtttgggcttgtaacgggcctttgtatttcaactctcaataataatccaagtgcatgttaaacaatttgtcatctgtttcggctttgatatactactggtgaagatgggccgtactactgcatcacaacgaaaaataataataagatgaaaaacttgaagtggaaaaaaaaaaaaacttgaatgttcactactactcattgaccataatgtttaacatacatagctcaatagtatttttgtgaatatggcaacacaaacagtccaaaacaattgtctcttactataccaaaccaagggcgccgcttgtttgccactctttgtgtgcaatagtgtgattaccacatctccacattcaatatattccctgaattatctgacgattttgatggctcactgttttcccaagtcttgaattgtcttctgtgcgccagtcaaatgcatatgtgttgagtttatcttttaaatatcaagcttttgtttttaacttttgtttgtaaccaaaaactcacagtaggagtttgatcacataattttatgtttgcctttgcaatttctagtgagtctttgattaaaagcttgaaaagaaaatgcagccaagcttaccaagtaagttatgtgtattaaccagaggaagagagaatcttgcaaaatttcaacaaacacaaaaagaagtattactacgattggtggagaaagaaaacgattccaaatcttgaactgttgttgtaaaagcatagcagaaagtgggagacaaccgaaatagaaatgactataacttaatttaatgttatcattataatttcttctagcaaatatttagaaagtaaatatcacatcaacctttaatgtaattaagctttctctttttgattcatgtgagatgaaaagaaaaaaaagaagagaaaagtgtagaaaacacatcatttctaagctgaagctgaggtacaaattaattaataagtgactagggtcacgtgaccctagtcacttatgattccgatgacttcgtaggttcctagctcaagccgctcgtgtccaagcgtcacttacgattagctaatgattacggcatctaggaccgactagttcttatgtgcttctagtctccaaatgtggttgatagttattttgctctaagatcaacagtaatgaagtataaatcatcgttgtggtgtgctactcggttaattgagcattaacacacacaaacatgacgaggatggtataatctccaaaaatgtgtactttgttaggtgggaccctatagccttgattaatgtgctatgttaggcatgcctggaaacgtgtgacgcatatgttttgtgaacctgttgatattatatgtgcttttatattaccatattttattaaaatactaatatttattactagtaagatataacattctatctagcttaaaaactaaccataaatattccataataactagatttaccaaactaatatactaaatatacataataaatacaaaattaacaagacaataatcaatatttatgagcttaatatatttagacattatggttggtcgacgataatcatgctaacttttcgtaattgcttgattgaaatatgcttagaataatgcctctttgttctacatggcaaatagggaccattatggtgtaacaccctgggaaccacaaacaccccgaaatgctactaaactacacaactaaccttcatatataaaatttcgacagcatctcctttgaaaatttgcatagacgtggaagcaacagagtataaacagatctagctagctaagtttaaacggccggccaaacgtgcaagcgctactagacaattcagtacattaaaaacgtccgcaatgtgttattaagttgtctaagcgtcaatttatttacaattgaatatatcctgcca

SEQ ID NO: 169 - DNA, 16534 bp, Artificial Sequence
  RV027344 T-DNA
caaacaaacatacacagcgatttattcacacgaacccgaattacaacggtatatatcctgtcagccaacaccaaaacatcaaaaaaatcgggatcaggatcaggatctgcggccgcatcctgcaggtttaaacggccggccttcactagctagctgctaagctcaaacgagcaggaagcaacgagagggtggcgcgcgaccgacgtgcgtacgtagcatgagcctgagtggagacgttggacgtgtatgtatatacctctctgcgtgttaactatgtacgtaagcggcaggcagtgcaataagtgtggctctgtagtatgtacgtgcgggtacgatgctgtaagctactgaggcaagtccataaataaataatgacacgtgcgtgttctataatctcttcgcttcttcatttgtccccttgcggagtttggcatccattgatgccgttacgctgagaacagacacagcagacgaaccaaaagtgagttcttgtatgaaactatgacccttcatcgctaggctcaaacagcaccccgtacgaacacagcaaattagtcatctaactattagcccctacatgtttcagacgatacataaatatagcccatccttagcaattagctattggccctgcccatcccaagcaatgatctcgaagtatttttaatatatagtatttttaatatgtagcttttaaaattagaagataattttgagacaaaaatctccaagtatttttttgggtattttttactgcctccgtttttctttatttctcgtcacctagtttaattttgtgctaatcggctataaacgaaacagagagaaaagttactctaaaagcaactccaacagattagatataaatcttatatcctgcctagagctgttaaaaagatagacaactttagtggattagtgtatgcaacaaactctccaaatttaagtatcccaactacccaacgcatatcgttcccttttcattggcgcacgaactttcacctgctatagccgacgtacatgttcgttttttttgggcggcgcttactttcttccccgttcgttctcagcatcgcaactcaatttgttatggcggagaagcccttgtatcccaggtagtaatgcacagatatgcattattattattcataaaatcgagctagttaccctatgaggtgacatgaagcgctcacggttactatgacggttagcttcacgactgttggtggcagtagcgtacgacttagctatagttccggacttacctaactgactagagtcacacttagctgaccctagtcacttaggcgcgccaagcttggatctcctgcaggatctggccggccggatgggcggatctcgtacctcaactttgtatagaaaagttgggccagaatggcccggaccgggttaccaagcggccgctattaaactaattaaacttagcctttttcattagttttgttactggaaacggttcgtctttagtgcacaaagaccaaggtcaatttaattctttaataaattcaattgagagatcagaagcttgtgaatctggttctctctctctcttctcttactagcttttgagtcgacaaaagagagagaaaagatcattaaactcgaatccaaaacttcaaccaacaaaagggaaaaaaagaaaaaataactacaaagagatctatctttagggtttcaaaactttcttgagtttcagatcgaattgagtaagtatttatattatttaagtgttcttcttactgtatcatttctgaccatacaccaaactagggtttcttaaagatcataactctctctctctcgcttcttcctacactagatctgtccgatagatctgatgctttgagaagtcttgtgactttcaagattgatttttctttttgtttgtttgtttatatgtacacatacttggagatagatatactctcatatatgttactgtgcatatggatggatccatcttaagtgtgaataaaaactacccaaatctcatttttgtttgtttcttatctcatttgttgtttttgtaaggccgtcattataaatctaaaacaatttatccgttttcgtaaagaaaatcgctttccaaaaaaaaaaactttgaagtaaaaatatcattttgggtctatattcaaatctctcctcatatttccatctcattatttgtaaaattaatatattaggtcattatcatattgattatagagtttatatgttatgttataaagtaaaagttatatatgtaaatattacgtttgtaatatatatatttatacatatgtacgtatacataatttgtatgtatatgtgcctcatttttaacaaatattatcgttaatctttagtttcattataattttttagggatgtatacattatataaatattttatgttatttatatctgaaatttctatactataacatcttagatagttttcatacgtaattaagagttttaattaatagttacataattatgattagatgaatttatctataaattgtatgcaaaaatatatacatatccaaccgaaaaaatggagagtaaacaaaaacctaacaattaatggtttagtacttgtgaaaatgataaaattattaatttaatatatagtttcataacagctagaaataactttcccttaatataattattttcttccatttccataatgattttcttcttcttcattctgtatacatatatgagcgtttcatatataatcttttactaattcgattgtgattttgattttgggcagtggaagatatacttggagaagaaaatcaaatcacgaaaatatattgatcagtgccttgaaggaaaccaaagttgacaactccaaaaatccatttcgttattaatatctaactgagtgatcatagtcaatcatccataacaccatggaaactcaacaacaacaagcagatattcaagattttgggaacaaaaacagtaacacctatgcatgcaggcaaagcagtactaggtggacacccacaagtgatcagatcagaatactgaaagagctctactacaacaatggaatcagatcaccaactgctgatcagattcagagaatcgctgctcaactcagacagtacggcaagattgaaggcaagaacgtgttttattggtttcagaaccataaagctcgtgaacgccagaagaaacggttcactcctactgctcctccaccaccgtctcacttctccgatcatattaaccaccatcttcccaacgctgcccccatgcagattccgtctcaccaccaccactaccaccatcaagaaccaccacatgtctatgctcaccctcacaaactctacaccactcatcacattggggttggttcttcttcacaaggagtgatgggtgtagggtgtggctatggatctgttgctatggagaagagtttcaggaagtgttcaatatcaccaccgggagagagtaaggccacaggaggaattggccggaatatcggttcaagatcacggataagtgtcgattcgtgttccttcttcgacacaattaagccaaagacatatgagatgtttgagaatcatgatcaagatgaagaacaaggagagccttcaactgagatcgaaacacttccattattcccgattcacgacggcaaccatcatgatttcttcggcatgaggacggcaaatctgcaattggagcaaggcactggaggttactacactggaggaagctggtatcggtctgatgagagggcgtctcttgagctcagtctcaactcatatggttattataactaattcgaactggccaggtacctgacatcttatagtctgcaacctctcgtgtctgaattcctatctttatcaagtgttattgcttccacgactataggacagctttcgtcgaaaggttttgctcatgtgatctcgaaggattcatctagtctgatttttcgtgacttgtatcggttttattggattcatccaacatatatcaataaaaaatgagttgtgtttcctttcttcctagttcagttaaaattatttccctcctgcgcttgtgctgtaattgtctgtgtacctgttgtttgtgactgtgttagttcccttggatatgatttcgtatttgatatgtacatggagatagcttagcttcattattggagtatgaagttagtatgacatagtcactctcctggaaaattgacactgcaaaccatatttttattctgaaccacaaatcctagtcagtccgctggcatatgccgtccgtttgctgaatccagaacgtgggtttggagatgtacggctgagatgcctctatgcgaaggggatttcgtggtgaaacgagatgggagtagagcaacgcccgtggaagatgcttcaaacttccacacttttgagcaacgatcggcagtagtaaggtagacgatttcaagatcaaagcatatgaagataaacaacatcaacaacaaaatttgttggggttctatagagagaaacagagctacatacatacactgttttgtatctaccatctgagatgatgaaaagatgaaaaactaaagaatgccccggcgccaacgccaggacacgccgcgcgcgcgtcacccgagccatctcttgacccagccggcgctgtatatttacacacgttgcagcatcgatcaccacctgttcgatcgcgtcgccgtcaccaagcttggcgcgccggtcacccggtccgggcctagaaggccacccggggctcggcgttaggcttttagtccgctaggtggctagaccgaggttaggacgctagttcactaggggcctagtggtgttttaaggatgggcaagtttgtacaaaaaagcaggctggcgccggaaccaattcagtcgagtgcggccgccagtgtgatggatatctcgacccgggtgattgcggttacatcatgtacggaaaaataattctaatccttgatttaaatttgaacttgactatttatttattctttatttcattttgtaaatcattttatgtatctcctggcaagcaattttatccaccttgcaccaacaccttcgggttccataatcaaaccaccttaacttcacaccatgctgtaactcacaccgcccagcatctccaatgtgaaagaagctaaaatttaataaacaatcatacgaagcagtgacaaaataccagatggtattaatgcttcgataaaattaattggaaagtataaaatggtagaaaataataaattataattaatttaagtaagataaaaaataattaaaaactaaaatgttaaaattttaaaaaaattattttaaataatatttaaaaacattaaaaatcattttaaaaaatttatttatagaacaattaaataaatatttcagctaataaaaaacaaaagcttacctagccttagaagacaacttgtccaacaattagatgatacccattgcccttacgttttctttaacatcaattattgtttttgtcaacaagctatcttttagttttattttattggtaaaaaatatgtcgccttcaagttgcatcatttaacacatctcgtcattagaaaaataaaactcttccctaaacgattagtagaaaaaatcattcgataataaataagaaagaaaaattagaaaaaaataacttcattttaaaaaaatcattaaggctatattttttaaatgactaattttatatagactgtaactaaaagtatacaatttattatgctatgtatcttaaagaattacttataaaaatctacggaagaatatcttacaaagtgaaaaacaaatgagaaagaatttagtgggatgattatgattttatttgaaaattgaaaaaataattattaaagactttagtggagtaagaaagctttcctattagtcttttcttatccataaaaaaaaaaaaaaaaatctagcgtgacagcttttccatagattttaataatgtaaaatactggtagcagccgaccgttcaggtaatggacactgtggtcctaacttgcaacgggtgcgggcccaatttaataacgccgtggtaacggataaagccaagcgtgaagcggtgaaggtacatctctgactccgtcaagattacgaaaccgtcaactacgaaggactccccgaaatatcatctgtgtcataaacaccaagtcacaccatacatgggcacgcgtcacaatatgattggagaacggttccaccgcatatgctataaaatgcccccacacccctcgaccctaatcgcacttcaattgcaatcaaattagttcattctctttgcgcagttccctacctctcctttcaaggttcgtagatttcttccgtttttttttcttcttctttattgtttgttctacatcagcatgatgttgatttgattgtgttttctatcgtttcatcgattataaattttcataatcagaagattcagcttttattaatgcaagaacgtccttaattgatgattttataaccgtaaattaggtctaattagagtttttttcataaagattttcagatccgtttacaacaagccttaattgttgattctgtagtcgtagattaaggtttttttcatgaactacttcagatccgttaaacaacagccttatttgttgatacttcagtcgtttttcaagaaattgttcagatccgttgataaaagccttattcgttgattctgtatggtatttcaagagatattgctcaggtcctttagcaactaccttatttgttgattctgtggccatagattaggattttttttcacgaaattgcttcttgaaattacgtgatggattttgattctgatttatcttgtgattgttgactctacagccatggcccacagcaagcacggcctgaaggaggagatgaccatgaagtaccacatggagggctgcgtgaacggccacaagttcgtgatcaccggcgagggcatcggctaccccttcaagggcaagcagaccatcaacctgtgcgtgatcgagggcggccccctgcccttcagcgaggacatcctgagcgccggcttcaagtacggcgaccggatcttcaccgagtacccccaggacatcgtggactacttcaagaacagctgccccgccggctacacctggggccggagcttcctgttcgaggacggcgccgtgtgcatctgtaacgtggacatcaccgtgagcgtgaaggagaactgcatctaccacaagagcatcttcaacggcgtgaacttccccgccgacggccccgtgatgaagaagatgaccaccaactgggaggccagctgcgagaagatcatgcccgtgcctaagcagggcatcctgaagggcgacgtgagcatgtacctgctgctgaaggacggcggccggtaccggtgccagttcgacaccgtgtacaaggccaagagcgtgcccagcaagatgcccgagtggcacttcatccagcacaagctgctgcgggaggaccggagcgacgccaagaaccagaagtggcagctgaccgagcacgccatcgccttccccagcgccctggcctgagagctcgaatttccccgatcgttcaaacatttggcaataaagtttcttaagattgaatcctgttgccggtcttgcgatgattatcatataatttctgttgaattacgttaagcatgtaataattaacatgtaatgcatgacgttatttatgagatgggtttttatgattagagtcccgcaattatacatttaatacgcgatagaaaacaaaatatagcgcgcaaactaggataaattatcgcgcgcggtgtcatctatgttactagatcgggaattctagtggccggcccagctgatatctagacccagctttcttgtacaaagtggccgttaacggatcggccagaatggcccggaccgggttaccgaattcgagctcggtaccctgggatccgatatcgatgggccctggccgaagcttggtcacccggtccgggcctagaaggccagcttcggccgccccgggcaactttattatacaaagttgatggtacggatccgtcgacggcgcgccgcggacctgaattccagcacactggcggccgttagtctaaaaacggcccctaactaacgcttagttgcccgctagattagtcccccgttagtgcctagttagacacacgacgaactaggggctactagtaacggccgccagtgtgctcggtacggccagaatggccatctggattcagcagggggtgattgcggttacatcatgtacggaaaaataattctaatccttgatttaaatttgaacttgactatttatttattctttatttcattttgtaaatcattttatgtatctcctggcaagcaattttatccaccttgcaccaacaccttcgggttccataatcaaaccaccttaacttcacaccatgctgtaactcacaccgcccagcatctccaatgtgaaagaagctaaaatttaataaacaatcatacgaagcagtgacaaaataccagatggtattaatgcttcgataaaattaattggaaagtataaaatggtagaaaataataaattataattaatttaagtaagataaaaaataattaaaaactaaaatgttaaaattttaaaaaaattattttaaataatatttaaaaacattaaaaatcattttaaaaaatttatttatagaacaattaaataaatatttcagctaataaaaaacaaaagcttacctagccttagaagacaacttgtccaacaattagatgatacccattgcccttacgttttctttaacatcaattattgtttttgtcaacaagctatcttttagttttattttattggtaaaaaatatgtcgccttcaagttgcatcatttaacacatctcgtcattagaaaaataaaactcttccctaaacgattagtagaaaaaatcattcgataataaataagaaagaaaaattagaaaaaaataacttcattttaaaaaaatcattaaggctatattttttaaatgactaattttatatagactgtaactaaaagtatacaatttattatgctatgtatcttaaagaattacttataaaaatctacggaagaatatcttacaaagtgaaaaacaaatgagaaagaatttagtgggatgattatgattttatttgaaaattgaaaaaataattattaaagactttagtggagtaagaaagctttcctattagtcttttcttatccataaaaaaaaaaaaaaaaatctagcgtgacagcttttccatagattttaataatgtaaaatactggtagcagccgaccgttcaggtaatggacactgtggtcctaacttgcaacgggtgcgggcccaatttaataacgccgtggtaacggataaagccaagcgtgaagcggtgaaggtacatctctgactccgtcaagattacgaaaccgtcaactacgaaggactccccgaaatatcatctgtgtcataaacaccaagtcacaccatacatgggcacgcgtcacaatatgattggagaacggttccaccgcatatgctataaaatgcccccacacccctcgaccctaatcgcacttcaattgcaatcaaattagttcattctctttgcgcagttccctacctctcctttcaaggttcgtagatttcttccgtttttttttcttcttctttattgtttgttctacatcagcatgatgttgatttgattgtgttttctatcgtttcatcgattataaattttcataatcagaagattcagcttttattaatgcaagaacgtccttaattgatgattttataaccgtaaattaggtctaattagagtttttttcataaagattttcagatccgtttacaacaagccttaattgttgattctgtagtcgtagattaaggtttttttcatgaactacttcagatccgttaaacaacagccttatttgttgatacttcagtcgtttttcaagaaattgttcagatccgttgataaaagccttattcgttgattctgtatggtatttcaagagatattgctcaggtcctttagcaactaccttatttgttgattctgtggccatagattaggattttttttcacgaaattgcttcttgaaattacgtgatggattttgattctgatttatcttgtgattgttgactctacagccatggctgcaactactcttacatctgctttacctggtgctttcagttcatcccagagaccaagtgctcctttcaacttacaaagatcacctagagtgcttagaaggttcaacagaaagacaggacgtcaacctcgtggacttgttcgtgctgcaaaggctcaagcggcgcaaaacctgccagagaaattcgatgaaacaagactctgggaggccctcaggggatttggggttagtccaagtagggttacttacgctcccgtcggattcggagattaccactggaccgtcacagatgaagacgggagaccttggttcgcaactgtcagtgacctcgaacacaaagagcattgcgggcagggagcacaagcagcccttaaaggactcagacaagctatggacactgccctcgcacttagagatagggacggactcagattcgtggttgctccagtggcagcaacagatgggggtggccctgtccttccccttgacgctaggtatgcactcacagtcttccctcacgtcccaggaagaacaggagagttcggacaaagactcacagaggcagagagggacagactgcttgctcttctggcagaactccacggaagaacacctcctgaaacaaccccaccagccgatatggaaccaccaggacttcctggtgttagagcagcactcgccgaaagtgaaggaccttggagtggaggaccatttgcagaacccgctagacttcttctcagagaacacgaggccacactgcacgcaagactcgctgaattcgaagccctcgtcgcaagagttaagggtcgtggagcacctcttgtcgttacccacggagaaccacacccaggcaacttgatcctcggagaggaaggctatctcctcgtggactgggatacagttggactggctccagctgaaagggatttgagtctcatctcagacgacccagctgacctcgcaagatacgcagagcttacaggaagaactccagacccagacgcactcgcactctatagactgcgttggagtctccttgatgtggctgagttcgtcgagtggttcagggctgaacaccaaagaacccaagacaccgagagtgcatggaaggggttcactgacacacttgggcaattggctgctggtggatcagctgcatagcaaacttatctctgttatgaatcagaagaagttcatgtctcgtttcatttaaaactttggtggtttgtgttttggggccttgtaaagcccctgatgaataattgttcaactatgtttccgttcctgtgttatacctttctttctaatgagtaatgacatcaaacttcttctgtattgaaattatgtccttgtgagtctctttatcatcgtttcgtctttacattatatgtgctacttttgtctaatgagcctgaaaagtggctccaatggtacgcactggaagatttgttggcttctggtagatatagcgacagtgttgagcttgtaatatcatgtctcttattgctaaattagttcctttcttaacagaaaccttcaaagtttttgtttttgttttcatttacctaatgtacacatacgctggccatgactaacaacatgtccaggcttagagcatatttttttctagcttaaattgttaacttgtcattcagtaaaatccgagaattgtgaagctctaattgaagctaattcgttttataaagtcagttaaaaagtatactaaattatccaacttttcttcaaaatctcaaaattctatgacaaaacgatagtctttgtttatgtcagtaccacaaagaggtggaaaaaaacaccaaaaaaacaataagcaaactatacactgagaagaaaaataaaagagagctcaatagatgttttatactaacggtagattagatcaaagatccaagctttactctacatagagcagaacccagaatcccttcatatctcttttattctagcaccgataatctactgaaaagaagacacttagagctctgtctctttgtcaaagaagtcccagccgtcatccagaagctccttacgttcattaacagaggccgcaattggatcgggtttacttattttgtgggtatctatacttttattagatttttaatcaggctcctgatttctttttatttcgattgaattcctgaacttgtattattcagtagatcgaataaattataaaaagataaaatcataaaataatattttatcctatcaatcatattaaagcaatgaatatgtaaaattaatcttatctttattttaaaaaatcatataggtttagtatttttttaaaaataaagataggattagttttactattcactgcttattacttttaaaaaaatcataaaggtttagtatttttttaaaataaatataggaatagttttactattcactgctttaatagaaaaatagtttaaaatttaagatagttttaatcccagcatttgccacgtttgaacgtgagccgaaacgatgtcgttacattatcttaacctagctgaaacgatgtcgtcataatatcgccaaatgccaactggactacgtcgaacccacaaatcccacaaagcgcgtgaaatcaaatcgctcaaaccacaaaaaagaacaacgcgtttgttacacgctcaatcccacgcgagtagagcacagtaaccttcaaataagcgaatggggcataatcagaaatccgaaataaacctaggggcattatcggaaatgaaaagtagctcactcaatataaaaatctaggaaccctagttttcgttatcactctgtgctccctcgctctatttctcagtctctgtgtttgcggctgaggattccgaacgagtgaccttcttcgtttctcgcaaaggtaacagcctctgctcttgtctcttcgattcgatctatgcctgtctcttatttacgatgatgtttcttcggttatgtttttttatttatgctttatgctgttgatgttcggttgtttgtttcgctttgtttttgtggttcagttttttaggattcttttggtttttgaatcgattaatcggaagagattttcgagttatttggtgtgttggaggtgaatcttttttttgaggtcatagatctgttgtatttgtgttataaacatgcgactttgtatgattttttacgaggttatgatgttctggttgttttattatgaatctgttgagacagaaccatgatttttgttgatgttcgtttacactattaaaggtttgttttaacaggattaaaagttttttaagcatgttgaaggagtcttgtagatatgtaaccgtcgatagtttttttgtgggtttgttcacatgttatcaagcttaatcttttactatgtatgcgaccatatctggatccagcaaaggcgattttttaattccttgtgaaacttttgtaatatgaagttgaaattttgttattggtaaactataaatgtgtgaagttggagtatacctttaccttcttatttggctttgtgatagtttaatttatatgtattttgagttctgacttgtatttctttgaattgattctagtttaagtaatcatggcctcctccgagaacgtcatcaccgagttcatgcgcttcaaggtgcgcatggagggcaccgtgaacggccacgagttcgagatcgagggcgagggcgagggccgcccctacgagggccacaacaccgtgaagctgaaggtgacgaagggcggccccctgcccttcgcctgggacatcctgtccccccagttccagtacggctccaaggtgtacgtgaagcaccccgccgacatccccgactacaagaagctgtccttccccgagggcttcaagtgggagcgcgtgatgaacttcgaggacggcggcgtggcgaccgtgacccaggactcctccctgcaggacggctgcttcatctacaaggtgaagttcatcggcgtgaacttcccctccgacggccccgtgatgcagaagaagaccatgggctgggaggcctccaccgagcgcctgtacccccgcgacggcgtgctgaagggcgagacccacaaggccctgaagctgaaggacggcggccactacctggtggagttcaagtccatctacatggccaagaagcccgtgcagctgcccggctactactacgtggacgccaagctggacatcacctcccacaacgaggactacaccatcgtggagcagtacgagcgcaccgagggccgccaccacctgttcctgtagttttgtgatctgatgataagtggttggttcgtgtctcatgcacttgggaggtgatctatttcacctggtgtagtttgtgtttccgtcagttggaaaaacttatccctatcgatttcgttttcattttctgcttttcttttatgtaccttcgtttgggcttgtaacgggcctttgtatttcaactctcaataataatccaagtgcatgttaaacaatttgtcatctgtttcggctttgatatactactggtgaagatgggccgtactactgcatcacaacgaaaaataataataagatgaaaaacttgaagtggaaaaaaaaaaaaacttgaatgttcactactactcattgaccataatgtttaacatacatagctcaatagtatttttgtgaatatggcaacacaaacagtccaaaacaattgtctcttactataccaaaccaagggcgccgcttgtttgccactctttgtgtgcaatagtgtgattaccacatctccacattcaatatattccctgaattatctgacgattttgatggctcactgttttcccaagtcttgaattgtcttctgtgcgccagtcaaatgcatatgtgttgagtttatcttttaaatatcaagcttttgtttttaacttttgtttgtaaccaaaaactcacagtaggagtttgatcacataattttatgtttgcctttgcaatttctagtgagtctttgattaaaagcttgaaaagaaaatgcagccaagcttaccaagtaagttatgtgtattaaccagaggaagagagaatcttgcaaaatttcaacaaacacaaaaagaagtattactacgattggtggagaaagaaaacgattccaaatcttgaactgttgttgtaaaagcatagcagaaagtgggagacaaccgaaatagaaatgactataacttaatttaatgttatcattataatttcttctagcaaatatttagaaagtaaatatcacatcaacctttaatgtaattaagctttctctttttgattcatgtgagatgaaaagaaaaaaaagaagagaaaagtgtagaaaacacatcatttctaagctgaagctgaggtacaaattaattaataagtgactagggtcacgtgaccctagtcacttatgattccgatgacttcgtaggttcctagctcaagccgctcgtgtccaagcgtcacttacgattagctaatgattacggcatctaggaccgactagttcttatgtgcttctagtctccaaatgtggttgatagttattttgctctaagatcaacagtaatgaagtataaatcatcgttgtggtgtgctactcggttaattgagcattaacacacacaaacatgacgaggatggtataatctccaaaaatgtgtactttgttaggtgggaccctatagccttgattaatgtgctatgttaggcatgcctggaaacgtgtgacgcatatgttttgtgaacctgttgatattatatgtgcttttatattaccatattttattaaaatactaatatttattactagtaagatataacattctatctagcttaaaaactaaccataaatattccataataactagatttaccaaactaatatactaaatatacataataaatacaaaattaacaagacaataatcaatatttatgagcttaatatatttagacattatggttggtcgacgataatcatgctaacttttcgtaattgcttgattgaaatatgcttagaataatgcctctttgttctacatggcaaatagggaccattatggtgtaacaccctgggaaccacaaacaccccgaaatgctactaaactacacaactaaccttcatatataaaatttcgacagcatctcctttgaaaatttgcatagacgtggaagcaacagagtataaacagatctagctagctaagtttaaacggccggccaaacgtgcaagcgctactagacaattcagtacattaaaaacgtccgcaatgtgttattaagttgtctaagcgtcaatttatttacaattgaatatatcctgcca

SEQ ID NO: 170 - DNA, 13210 bp, Artificial Sequence
  RV026532 - T-DNA
caaacaaacatacacagcgatttattcacacgaacccgaattacaacggtatatatcctgtcagccaacaccaaaacatcaaaaaaatcgggatcaggatcaggatctgcggccgcatcctgcaggtttaaacggccggccttcactagctagctgctaagctcaaacgagcaggaagcaacgagagggtggcgcgcgaccgacgtgcgtacgtagcatgagcctgagtggagacgttggacgtgtatgtatatacctctctgcgtgttaactatgtacgtaagcggcaggcagtgcaataagtgtggctctgtagtatgtacgtgcgggtacgatgctgtaagctactgaggcaagtccataaataaataatgacacgtgcgtgttctataatctcttcgcttcttcatttgtccccttgcggagtttggcatccattgatgccgttacgctgagaacagacacagcagacgaaccaaaagtgagttcttgtatgaaactatgacccttcatcgctaggctcaaacagcaccccgtacgaacacagcaaattagtcatctaactattagcccctacatgtttcagacgatacataaatatagcccatccttagcaattagctattggccctgcccatcccaagcaatgatctcgaagtatttttaatatatagtatttttaatatgtagcttttaaaattagaagataattttgagacaaaaatctccaagtatttttttgggtattttttactgcctccgtttttctttatttctcgtcacctagtttaattttgtgctaatcggctataaacgaaacagagagaaaagttactctaaaagcaactccaacagattagatataaatcttatatcctgcctagagctgttaaaaagatagacaactttagtggattagtgtatgcaacaaactctccaaatttaagtatcccaactacccaacgcatatcgttcccttttcattggcgcacgaactttcacctgctatagccgacgtacatgttcgttttttttgggcggcgcttactttcttccccgttcgttctcagcatcgcaactcaatttgttatggcggagaagcccttgtatcccaggtagtaatgcacagatatgcattattattattcataaaatcgagctagttaccctatgaggtgacatgaagcgctcacggttactatgacggttagcttcacgactgttggtggcagtagcgtacgacttagctatagttccggacttacctaactgactagagtcacacttagctgaccctagtcacttaggcgcgccaagcttggatctcctgcaggatctggccggccggatgggcggatctcgtacctcaactttgtatagaaaagttgggccgaattcgagctcggtacggccagaatggcccggaccgggttaccgaattcgagctcggtaccctgggatccgatatcgatgggccctggccgaagcttggtcacccggtccgggcctagaaggccagcttcaagtttgtacaaaaaagcaggctggcgccggaaccaattcagtcgagtgcggccgccagtgtgatggatatctcgacccgggtgattgcggttacatcatgtacggaaaaataattctaatccttgatttaaatttgaacttgactatttatttattctttatttcattttgtaaatcattttatgtatctcctggcaagcaattttatccaccttgcaccaacaccttcgggttccataatcaaaccaccttaacttcacaccatgctgtaactcacaccgcccagcatctccaatgtgaaagaagctaaaatttaataaacaatcatacgaagcagtgacaaaataccagatggtattaatgcttcgataaaattaattggaaagtataaaatggtagaaaataataaattataattaatttaagtaagataaaaaataattaaaaactaaaatgttaaaattttaaaaaaattattttaaataatatttaaaaacattaaaaatcattttaaaaaatttatttatagaacaattaaataaatatttcagctaataaaaaacaaaagcttacctagccttagaagacaacttgtccaacaattagatgatacccattgcccttacgttttctttaacatcaattattgtttttgtcaacaagctatcttttagttttattttattggtaaaaaatatgtcgccttcaagttgcatcatttaacacatctcgtcattagaaaaataaaactcttccctaaacgattagtagaaaaaatcattcgataataaataagaaagaaaaattagaaaaaaataacttcattttaaaaaaatcattaaggctatattttttaaatgactaattttatatagactgtaactaaaagtatacaatttattatgctatgtatcttaaagaattacttataaaaatctacggaagaatatcttacaaagtgaaaaacaaatgagaaagaatttagtgggatgattatgattttatttgaaaattgaaaaaataattattaaagactttagtggagtaagaaagctttcctattagtcttttcttatccataaaaaaaaaaaaaaaaatctagcgtgacagcttttccatagattttaataatgtaaaatactggtagcagccgaccgttcaggtaatggacactgtggtcctaacttgcaacgggtgcgggcccaatttaataacgccgtggtaacggataaagccaagcgtgaagcggtgaaggtacatctctgactccgtcaagattacgaaaccgtcaactacgaaggactccccgaaatatcatctgtgtcataaacaccaagtcacaccatacatgggcacgcgtcacaatatgattggagaacggttccaccgcatatgctataaaatgcccccacacccctcgaccctaatcgcacttcaattgcaatcaaattagttcattctctttgcgcagttccctacctctcctttcaaggttcgtagatttcttccgtttttttttcttcttctttattgtttgttctacatcagcatgatgttgatttgattgtgttttctatcgtttcatcgattataaattttcataatcagaagattcagcttttattaatgcaagaacgtccttaattgatgattttataaccgtaaattaggtctaattagagtttttttcataaagattttcagatccgtttacaacaagccttaattgttgattctgtagtcgtagattaaggtttttttcatgaactacttcagatccgttaaacaacagccttatttgttgatacttcagtcgtttttcaagaaattgttcagatccgttgataaaagccttattcgttgattctgtatggtatttcaagagatattgctcaggtcctttagcaactaccttatttgttgattctgtggccatagattaggattttttttcacgaaattgcttcttgaaattacgtgatggattttgattctgatttatcttgtgattgttgactctacagccatggcccacagcaagcacggcctgaaggaggagatgaccatgaagtaccacatggagggctgcgtgaacggccacaagttcgtgatcaccggcgagggcatcggctaccccttcaagggcaagcagaccatcaacctgtgcgtgatcgagggcggccccctgcccttcagcgaggacatcctgagcgccggcttcaagtacggcgaccggatcttcaccgagtacccccaggacatcgtggactacttcaagaacagctgccccgccggctacacctggggccggagcttcctgttcgaggacggcgccgtgtgcatctgtaacgtggacatcaccgtgagcgtgaaggagaactgcatctaccacaagagcatcttcaacggcgtgaacttccccgccgacggccccgtgatgaagaagatgaccaccaactgggaggccagctgcgagaagatcatgcccgtgcctaagcagggcatcctgaagggcgacgtgagcatgtacctgctgctgaaggacggcggccggtaccggtgccagttcgacaccgtgtacaaggccaagagcgtgcccagcaagatgcccgagtggcacttcatccagcacaagctgctgcgggaggaccggagcgacgccaagaaccagaagtggcagctgaccgagcacgccatcgccttccccagcgccctggcctgagagctcgaatttccccgatcgttcaaacatttggcaataaagtttcttaagattgaatcctgttgccggtcttgcgatgattatcatataatttctgttgaattacgttaagcatgtaataattaacatgtaatgcatgacgttatttatgagatgggtttttatgattagagtcccgcaattatacatttaatacgcgatagaaaacaaaatatagcgcgcaaactaggataaattatcgcgcgcggtgtcatctatgttactagatcgggaattctagtggccggcccagctgatatctagacccagctttcttgtacaaagtggccgttaacggatcggccagaatggcccggaccgggttaccgaattcgagctcggtaccctgggatccgatatcgatgggccctggccgaagcttggtcacccggtccgggcctagaaggccagcttcggccgccccgggcaactttattatacaaagttgatggtacggatccgtcgacggcgcgccgcggacctgaattccagcacactggcggccgttagtctaaaaacggcccctaactaacgcttagttgcccgctagattagtcccccgttagtgcctagttagacacacgacgaactaggggctactagtaacggccgccagtgtgctcggtacggccagaatggccatctggattcagcagggggtgattgcggttacatcatgtacggaaaaataattctaatccttgatttaaatttgaacttgactatttatttattctttatttcattttgtaaatcattttatgtatctcctggcaagcaattttatccaccttgcaccaacaccttcgggttccataatcaaaccaccttaacttcacaccatgctgtaactcacaccgcccagcatctccaatgtgaaagaagctaaaatttaataaacaatcatacgaagcagtgacaaaataccagatggtattaatgcttcgataaaattaattggaaagtataaaatggtagaaaataataaattataattaatttaagtaagataaaaaataattaaaaactaaaatgttaaaattttaaaaaaattattttaaataatatttaaaaacattaaaaatcattttaaaaaatttatttatagaacaattaaataaatatttcagctaataaaaaacaaaagcttacctagccttagaagacaacttgtccaacaattagatgatacccattgcccttacgttttctttaacatcaattattgtttttgtcaacaagctatcttttagttttattttattggtaaaaaatatgtcgccttcaagttgcatcatttaacacatctcgtcattagaaaaataaaactcttccctaaacgattagtagaaaaaatcattcgataataaataagaaagaaaaattagaaaaaaataacttcattttaaaaaaatcattaaggctatattttttaaatgactaattttatatagactgtaactaaaagtatacaatttattatgctatgtatcttaaagaattacttataaaaatctacggaagaatatcttacaaagtgaaaaacaaatgagaaagaatttagtgggatgattatgattttatttgaaaattgaaaaaataattattaaagactttagtggagtaagaaagctttcctattagtcttttcttatccataaaaaaaaaaaaaaaaatctagcgtgacagcttttccatagattttaataatgtaaaatactggtagcagccgaccgttcaggtaatggacactgtggtcctaacttgcaacgggtgcgggcccaatttaataacgccgtggtaacggataaagccaagcgtgaagcggtgaaggtacatctctgactccgtcaagattacgaaaccgtcaactacgaaggactccccgaaatatcatctgtgtcataaacaccaagtcacaccatacatgggcacgcgtcacaatatgattggagaacggttccaccgcatatgctataaaatgcccccacacccctcgaccctaatcgcacttcaattgcaatcaaattagttcattctctttgcgcagttccctacctctcctttcaaggttcgtagatttcttccgtttttttttcttcttctttattgtttgttctacatcagcatgatgttgatttgattgtgttttctatcgtttcatcgattataaattttcataatcagaagattcagcttttattaatgcaagaacgtccttaattgatgattttataaccgtaaattaggtctaattagagtttttttcataaagattttcagatccgtttacaacaagccttaattgttgattctgtagtcgtagattaaggtttttttcatgaactacttcagatccgttaaacaacagccttatttgttgatacttcagtcgtttttcaagaaattgttcagatccgttgataaaagccttattcgttgattctgtatggtatttcaagagatattgctcaggtcctttagcaactaccttatttgttgattctgtggccatagattaggattttttttcacgaaattgcttcttgaaattacgtgatggattttgattctgatttatcttgtgattgttgactctacagccatggctgcaactactcttacatctgctttacctggtgctttcagttcatcccagagaccaagtgctcctttcaacttacaaagatcacctagagtgcttagaaggttcaacagaaagacaggacgtcaacctcgtggacttgttcgtgctgcaaaggctcaagcggcgcaaaacctgccagagaaattcgatgaaacaagactctgggaggccctcaggggatttggggttagtccaagtagggttacttacgctcccgtcggattcggagattaccactggaccgtcacagatgaagacgggagaccttggttcgcaactgtcagtgacctcgaacacaaagagcattgcgggcagggagcacaagcagcccttaaaggactcagacaagctatggacactgccctcgcacttagagatagggacggactcagattcgtggttgctccagtggcagcaacagatgggggtggccctgtccttccccttgacgctaggtatgcactcacagtcttccctcacgtcccaggaagaacaggagagttcggacaaagactcacagaggcagagagggacagactgcttgctcttctggcagaactccacggaagaacacctcctgaaacaaccccaccagccgatatggaaccaccaggacttcctggtgttagagcagcactcgccgaaagtgaaggaccttggagtggaggaccatttgcagaacccgctagacttcttctcagagaacacgaggccacactgcacgcaagactcgctgaattcgaagccctcgtcgcaagagttaagggtcgtggagcacctcttgtcgttacccacggagaaccacacccaggcaacttgatcctcggagaggaaggctatctcctcgtggactgggatacagttggactggctccagctgaaagggatttgagtctcatctcagacgacccagctgacctcgcaagatacgcagagcttacaggaagaactccagacccagacgcactcgcactctatagactgcgttggagtctccttgatgtggctgagttcgtcgagtggttcagggctgaacaccaaagaacccaagacaccgagagtgcatggaaggggttcactgacacacttgggcaattggctgctggtggatcagctgcatagcaaacttatctctgttatgaatcagaagaagttcatgtctcgtttcatttaaaactttggtggtttgtgttttggggccttgtaaagcccctgatgaataattgttcaactatgtttccgttcctgtgttatacctttctttctaatgagtaatgacatcaaacttcttctgtattgaaattatgtccttgtgagtctctttatcatcgtttcgtctttacattatatgtgctacttttgtctaatgagcctgaaaagtggctccaatggtacgcactggaagatttgttggcttctggtagatatagcgacagtgttgagcttgtaatatcatgtctcttattgctaaattagttcctttcttaacagaaaccttcaaagtttttgtttttgttttcatttacctaatgtacacatacgctggccatgactaacaacatgtccaggcttagagcatatttttttctagcttaaattgttaacttgtcattcagtaaaatccgagaattgtgaagctctaattgaagctaattcgttttataaagtcagttaaaaagtatactaaattatccaacttttcttcaaaatctcaaaattctatgacaaaacgatagtctttgtttatgtcagtaccacaaagaggtggaaaaaaacaccaaaaaaacaataagcaaactatacactgagaagaaaaataaaagagagctcaatagatgttttatactaacggtagattagatcaaagatccaagctttactctacatagagcagaacccagaatcccttcatatctcttttattctagcaccgataatctactgaaaagaagacacttagagctctgtctctttgtcaaagaagtcccagccgtcatccagaagctccttacgttcattaacagaggccgcaattggatcgggtttacttattttgtgggtatctatacttttattagatttttaatcaggctcctgatttctttttatttcgattgaattcctgaacttgtattattcagtagatcgaataaattataaaaagataaaatcataaaataatattttatcctatcaatcatattaaagcaatgaatatgtaaaattaatcttatctttattttaaaaaatcatataggtttagtatttttttaaaaataaagataggattagttttactattcactgcttattacttttaaaaaaatcataaaggtttagtatttttttaaaataaatataggaatagttttactattcactgctttaatagaaaaatagtttaaaatttaagatagttttaatcccagcatttgccacgtttgaacgtgagccgaaacgatgtcgttacattatcttaacctagctgaaacgatgtcgtcataatatcgccaaatgccaactggactacgtcgaacccacaaatcccacaaagcgcgtgaaatcaaatcgctcaaaccacaaaaaagaacaacgcgtttgttacacgctcaatcccacgcgagtagagcacagtaaccttcaaataagcgaatggggcataatcagaaatccgaaataaacctaggggcattatcggaaatgaaaagtagctcactcaatataaaaatctaggaaccctagttttcgttatcactctgtgctccctcgctctatttctcagtctctgtgtttgcggctgaggattccgaacgagtgaccttcttcgtttctcgcaaaggtaacagcctctgctcttgtctcttcgattcgatctatgcctgtctcttatttacgatgatgtttcttcggttatgtttttttatttatgctttatgctgttgatgttcggttgtttgtttcgctttgtttttgtggttcagttttttaggattcttttggtttttgaatcgattaatcggaagagattttcgagttatttggtgtgttggaggtgaatcttttttttgaggtcatagatctgttgtatttgtgttataaacatgcgactttgtatgattttttacgaggttatgatgttctggttgttttattatgaatctgttgagacagaaccatgatttttgttgatgttcgtttacactattaaaggtttgttttaacaggattaaaagttttttaagcatgttgaaggagtcttgtagatatgtaaccgtcgatagtttttttgtgggtttgttcacatgttatcaagcttaatcttttactatgtatgcgaccatatctggatccagcaaaggcgattttttaattccttgtgaaacttttgtaatatgaagttgaaattttgttattggtaaactataaatgtgtgaagttggagtatacctttaccttcttatttggctttgtgatagtttaatttatatgtattttgagttctgacttgtatttctttgaattgattctagtttaagtaatcatggcctcctccgagaacgtcatcaccgagttcatgcgcttcaaggtgcgcatggagggcaccgtgaacggccacgagttcgagatcgagggcgagggcgagggccgcccctacgagggccacaacaccgtgaagctgaaggtgacgaagggcggccccctgcccttcgcctgggacatcctgtccccccagttccagtacggctccaaggtgtacgtgaagcaccccgccgacatccccgactacaagaagctgtccttccccgagggcttcaagtgggagcgcgtgatgaacttcgaggacggcggcgtggcgaccgtgacccaggactcctccctgcaggacggctgcttcatctacaaggtgaagttcatcggcgtgaacttcccctccgacggccccgtgatgcagaagaagaccatgggctgggaggcctccaccgagcgcctgtacccccgcgacggcgtgctgaagggcgagacccacaaggccctgaagctgaaggacggcggccactacctggtggagttcaagtccatctacatggccaagaagcccgtgcagctgcccggctactactacgtggacgccaagctggacatcacctcccacaacgaggactacaccatcgtggagcagtacgagcgcaccgagggccgccaccacctgttcctgtagttttgtgatctgatgataagtggttggttcgtgtctcatgcacttgggaggtgatctatttcacctggtgtagtttgtgtttccgtcagttggaaaaacttatccctatcgatttcgttttcattttctgcttttcttttatgtaccttcgtttgggcttgtaacgggcctttgtatttcaactctcaataataatccaagtgcatgttaaacaatttgtcatctgtttcggctttgatatactactggtgaagatgggccgtactactgcatcacaacgaaaaataataataagatgaaaaacttgaagtggaaaaaaaaaaaaacttgaatgttcactactactcattgaccataatgtttaacatacatagctcaatagtatttttgtgaatatggcaacacaaacagtccaaaacaattgtctcttactataccaaaccaagggcgccgcttgtttgccactctttgtgtgcaatagtgtgattaccacatctccacattcaatatattccctgaattatctgacgattttgatggctcactgttttcccaagtcttgaattgtcttctgtgcgccagtcaaatgcatatgtgttgagtttatcttttaaatatcaagcttttgtttttaacttttgtttgtaaccaaaaactcacagtaggagtttgatcacataattttatgtttgcctttgcaatttctagtgagtctttgattaaaagcttgaaaagaaaatgcagccaagcttaccaagtaagttatgtgtattaaccagaggaagagagaatcttgcaaaatttcaacaaacacaaaaagaagtattactacgattggtggagaaagaaaacgattccaaatcttgaactgttgttgtaaaagcatagcagaaagtgggagacaaccgaaatagaaatgactataacttaatttaatgttatcattataatttcttctagcaaatatttagaaagtaaatatcacatcaacctttaatgtaattaagctttctctttttgattcatgtgagatgaaaagaaaaaaaagaagagaaaagtgtagaaaacacatcatttctaagctgaagctgaggtacaaattaattaataagtgactagggtcacgtgaccctagtcacttatgattccgatgacttcgtaggttcctagctcaagccgctcgtgtccaagcgtcacttacgattagctaatgattacggcatctaggaccgactagttcttatgtgcttctagtctccaaatgtggttgatagttattttgctctaagatcaacagtaatgaagtataaatcatcgttgtggtgtgctactcggttaattgagcattaacacacacaaacatgacgaggatggtataatctccaaaaatgtgtactttgttaggtgggaccctatagccttgattaatgtgctatgttaggcatgcctggaaacgtgtgacgcatatgttttgtgaacctgttgatattatatgtgcttttatattaccatattttattaaaatactaatatttattactagtaagatataacattctatctagcttaaaaactaaccataaatattccataataactagatttaccaaactaatatactaaatatacataataaatacaaaattaacaagacaataatcaatatttatgagcttaatatatttagacattatggttggtcgacgataatcatgctaacttttcgtaattgcttgattgaaatatgcttagaataatgcctctttgttctacatggcaaatagggaccattatggtgtaacaccctgggaaccacaaacaccccgaaatgctactaaactacacaactaaccttcatatataaaatttcgacagcatctcctttgaaaatttgcatagacgtggaagcaacagagtataaacagatctagctagctaagtttaaacggccggccaaacgtgcaagcgctactagacaattcagtacattaaaaacgtccgcaatgtgttattaagttgtctaagcgtcaatttatttacaattgaatatatcctgcca

SEQ ID NO: 171 - DNA, 16939 bp, Artificial Sequence
  RV027337 T-DNA
caaacaaacatacacagcgatttattcacacgaacccgaattacaacggtatatatcctgtcagccaacaccaaaacatcaaaaaaatcgggatcaggatcaggatctgcggccgcatcctgcaggtttaaacggccggccttcactagctagctgctaagctcaaacgagcaggaagcaacgagagggtggcgcgcgaccgacgtgcgtacgtagcatgagcctgagtggagacgttggacgtgtatgtatatacctctctgcgtgttaactatgtacgtaagcggcaggcagtgcaataagtgtggctctgtagtatgtacgtgcgggtacgatgctgtaagctactgaggcaagtccataaataaataatgacacgtgcgtgttctataatctcttcgcttcttcatttgtccccttgcggagtttggcatccattgatgccgttacgctgagaacagacacagcagacgaaccaaaagtgagttcttgtatgaaactatgacccttcatcgctaggctcaaacagcaccccgtacgaacacagcaaattagtcatctaactattagcccctacatgtttcagacgatacataaatatagcccatccttagcaattagctattggccctgcccatcccaagcaatgatctcgaagtatttttaatatatagtatttttaatatgtagcttttaaaattagaagataattttgagacaaaaatctccaagtatttttttgggtattttttactgcctccgtttttctttatttctcgtcacctagtttaattttgtgctaatcggctataaacgaaacagagagaaaagttactctaaaagcaactccaacagattagatataaatcttatatcctgcctagagctgttaaaaagatagacaactttagtggattagtgtatgcaacaaactctccaaatttaagtatcccaactacccaacgcatatcgttcccttttcattggcgcacgaactttcacctgctatagccgacgtacatgttcgttttttttgggcggcgcttactttcttccccgttcgttctcagcatcgcaactcaatttgttatggcggagaagcccttgtatcccaggtagtaatgcacagatatgcattattattattcataaaatcgagctagttaccctatgaggtgacatgaagcgctcacggttactatgacggttagcttcacgactgttggtggcagtagcgtacgacttagctatagttccggacttacctaactgactagagtcacacttagctgaccctagtcacttaggcgcgccaagcttggatctcctgcaggatctggccggccggatgggcggatctcgtacctcaactttgtatagaaaagttgggccagaatggcccggaccgggttaccaagcggccgctttgagccaacagtcggaaaacaaccatcacttagcatttttttatttttaatactactatttttttttttgtaattagtcgagtgtaccaatcccaaatttaatgggtatctttcataaccaaaaagaaaaaagcacaaaaacaaaatactactactatactataatggtgaaacacacattacattagcattaaccgctattccttaaaagatatatgagcagactacaaggaagtacatttaaatcagtgtgctaagttttctcaattatcaatctaataattgtacttacataaatttaccaaatcatctcaccatttagggcatacaatttttgctcaataatggagcttgaaaagactaattatagaatgtctttttggttgacacaagctcgcttcttcatgtcgtttactttaaaaattgtagattctttcacaacttataagattctatagcctatttgattatcctttaggatgatgagtataatatctcaaactataaaataaaaatgttcacatcaataattgaaaaaaaatgcatgtatgaattcacgaaaatatggttacggttgtgtgttgctgctagacaaaagtctttcatatattcagttatatttcttaaaactaatcaaaattgttttatgcaattttggcgagtagagagaaaaagcgcgtgggataaataaagaaaggcgttataaaaaaagagaaaaagtcaaccgagtagttctggtaagagagtctcgtgcattcgtaaggtttccaagagtccacatatctatttcatcatcctcttaacgtttttctcacttacttttttccccactcttaattgattccgttgataaaatttgttcgttatatagaaataatcagaatataattagggttaattttggagtaaagaccattcaatcaatggtttggcttgattcttgtttgaaattctatgtttaaaaagggtaatacttacaaacttgactttattagtattttaaaaaatgacaaaacttaaaatggatttgaaatctagcatatttaactttaatacagttttggtttaagtttcactctcttttctatcaaaaatataattttaaaatttgaaagatgttaaaatagacaaatgtcattagtttgttcagatttagttatgtttttaatatacagacaattatattaaaataataataaaaaagtcagatcagttataaaagaaagtcagttcagttttaagacttaagtttgagtcttttggatttgaatttaatagattcacttttattaaaaattgttgaaacactttttaaaaactaaaacatttgtcaaaaaatgcatttaaccaaaaaaatgaaaatgaaaggtagtaagtaataaaagaagaaaacaaaatctaaaaaagtgtctttaaaatctcaaaattaaaatatacaaaaaagtacaagaaaataaaagaaaagggggaaaaagagagtcaatatcaacatgcaagtgtgaatattagactcttcttctctcatcagttaccccaaaactagggtttacccattttcatcatcttcttcttccccacatcactctctgaaagacaataagagagagagacacacacaccaaaaaaaaaaccccattgatttttaagagagagagagagactgagaacgaagagcaaatgagagagaagttgaatcaaatttccgctttcgttctctttctctctcctccatttcagtaataaacactccttcctctttaatttttctgggtttcttcttcttccctcttttgttgtttctgtgtgattcagttctcgatccatcttttcgtgaaaagtatcaatcttttaattctctagttgtttgtcaaatctggttagtttcttctcttgtatttatttgccatggaaactcaacaacaacaagcagatattcaagattttgggaacaaaaacagtaacacctatgcatgcaggcaaagcagtactaggtggacacccacaagtgatcagatcagaatactgaaagagctctactacaacaatggaatcagatcaccaactgctgatcagattcagagaatcgctgctcaactcagacagtacggcaagattgaaggcaagaacgtgttttattggtttcagaaccataaagctcgtgaacgccagaagaaacggttcactcctactgctcctccaccaccgtctcacttctccgatcatattaaccaccatcttcccaacgctgcccccatgcagattccgtctcaccaccaccactaccaccatcaagaaccaccacatgtctatgctcaccctcacaaactctacaccactcatcacattggggttggttcttcttcacaaggagtgatgggtgtagggtgtggctatggatctgttgctatggagaagagtttcaggaagtgttcaatatcaccaccgggagagagtaaggccacaggaggaattggccggaatatcggttcaagatcacggataagtgtcgattcgtgttccttcttcgacacaattaagccaaagacatatgagatgtttgagaatcatgatcaagatgaagaacaaggagagccttcaactgagatcgaaacacttccattattcccgattcacgacggcaaccatcatgatttcttcggcatgaggacggcaaatctgcaattggagcaaggcactggaggttactacactggaggaagctggtatcggtctgatgagagggcgtctcttgagctcagtctcaactcatatggttattataactaattcgaactggccaggtacctgacatcttatagtctgcaacctctcgtgtctgaattcctatctttatcaagtgttattgcttccacgactataggacagctttcgtcgaaaggttttgctcatgtgatctcgaaggattcatctagtctgatttttcgtgacttgtatcggttttattggattcatccaacatatatcaataaaaaatgagttgtgtttcctttcttcctagttcagttaaaattatttccctcctgcgcttgtgctgtaattgtctgtgtacctgttgtttgtgactgtgttagttcccttggatatgatttcgtatttgatatgtacatggagatagcttagcttcattattggagtatgaagttagtatgacatagtcactctcctggaaaattgacactgcaaaccatatttttattctgaaccacaaatcctagtcagtccgctggcatatgccgtccgtttgctgaatccagaacgtgggtttggagatgtacggctgagatgcctctatgcgaaggggatttcgtggtgaaacgagatgggagtagagcaacgcccgtggaagatgcttcaaacttccacacttttgagcaacgatcggcagtagtaaggtagacgatttcaagatcaaagcatatgaagataaacaacatcaacaacaaaatttgttggggttctatagagagaaacagagctacatacatacactgttttgtatctaccatctgagatgatgaaaagatgaaaaactaaagaatgccccggcgccaacgccaggacacgccgcgcgcgcgtcacccgagccatctcttgacccagccggcgctgtatatttacacacgttgcagcatcgatcaccacctgttcgatcgcgtcgccgtcaccaagcttggcgcgccggtcacccggtccgggcctagaaggccacccggggctcggcgttaggcttttagtccgctaggtggctagaccgaggttaggacgctagttcactaggggcctagtggtgttttaaggatgggcaagtttgtacaaaaaagcaggctggcgccggaaccaattcagtcgagtgcggccgccagtgtgatggatatctcgacccgggtgattgcggttacatcatgtacggaaaaataattctaatccttgatttaaatttgaacttgactatttatttattctttatttcattttgtaaatcattttatgtatctcctggcaagcaattttatccaccttgcaccaacaccttcgggttccataatcaaaccaccttaacttcacaccatgctgtaactcacaccgcccagcatctccaatgtgaaagaagctaaaatttaataaacaatcatacgaagcagtgacaaaataccagatggtattaatgcttcgataaaattaattggaaagtataaaatggtagaaaataataaattataattaatttaagtaagataaaaaataattaaaaactaaaatgttaaaattttaaaaaaattattttaaataatatttaaaaacattaaaaatcattttaaaaaatttatttatagaacaattaaataaatatttcagctaataaaaaacaaaagcttacctagccttagaagacaacttgtccaacaattagatgatacccattgcccttacgttttctttaacatcaattattgtttttgtcaacaagctatcttttagttttattttattggtaaaaaatatgtcgccttcaagttgcatcatttaacacatctcgtcattagaaaaataaaactcttccctaaacgattagtagaaaaaatcattcgataataaataagaaagaaaaattagaaaaaaataacttcattttaaaaaaatcattaaggctatattttttaaatgactaattttatatagactgtaactaaaagtatacaatttattatgctatgtatcttaaagaattacttataaaaatctacggaagaatatcttacaaagtgaaaaacaaatgagaaagaatttagtgggatgattatgattttatttgaaaattgaaaaaataattattaaagactttagtggagtaagaaagctttcctattagtcttttcttatccataaaaaaaaaaaaaaaaatctagcgtgacagcttttccatagattttaataatgtaaaatactggtagcagccgaccgttcaggtaatggacactgtggtcctaacttgcaacgggtgcgggcccaatttaataacgccgtggtaacggataaagccaagcgtgaagcggtgaaggtacatctctgactccgtcaagattacgaaaccgtcaactacgaaggactccccgaaatatcatctgtgtcataaacaccaagtcacaccatacatgggcacgcgtcacaatatgattggagaacggttccaccgcatatgctataaaatgcccccacacccctcgaccctaatcgcacttcaattgcaatcaaattagttcattctctttgcgcagttccctacctctcctttcaaggttcgtagatttcttccgtttttttttcttcttctttattgtttgttctacatcagcatgatgttgatttgattgtgttttctatcgtttcatcgattataaattttcataatcagaagattcagcttttattaatgcaagaacgtccttaattgatgattttataaccgtaaattaggtctaattagagtttttttcataaagattttcagatccgtttacaacaagccttaattgttgattctgtagtcgtagattaaggtttttttcatgaactacttcagatccgttaaacaacagccttatttgttgatacttcagtcgtttttcaagaaattgttcagatccgttgataaaagccttattcgttgattctgtatggtatttcaagagatattgctcaggtcctttagcaactaccttatttgttgattctgtggccatagattaggattttttttcacgaaattgcttcttgaaattacgtgatggattttgattctgatttatcttgtgattgttgactctacagccatggcccacagcaagcacggcctgaaggaggagatgaccatgaagtaccacatggagggctgcgtgaacggccacaagttcgtgatcaccggcgagggcatcggctaccccttcaagggcaagcagaccatcaacctgtgcgtgatcgagggcggccccctgcccttcagcgaggacatcctgagcgccggcttcaagtacggcgaccggatcttcaccgagtacccccaggacatcgtggactacttcaagaacagctgccccgccggctacacctggggccggagcttcctgttcgaggacggcgccgtgtgcatctgtaacgtggacatcaccgtgagcgtgaaggagaactgcatctaccacaagagcatcttcaacggcgtgaacttccccgccgacggccccgtgatgaagaagatgaccaccaactgggaggccagctgcgagaagatcatgcccgtgcctaagcagggcatcctgaagggcgacgtgagcatgtacctgctgctgaaggacggcggccggtaccggtgccagttcgacaccgtgtacaaggccaagagcgtgcccagcaagatgcccgagtggcacttcatccagcacaagctgctgcgggaggaccggagcgacgccaagaaccagaagtggcagctgaccgagcacgccatcgccttccccagcgccctggcctgagagctcgaatttccccgatcgttcaaacatttggcaataaagtttcttaagattgaatcctgttgccggtcttgcgatgattatcatataatttctgttgaattacgttaagcatgtaataattaacatgtaatgcatgacgttatttatgagatgggtttttatgattagagtcccgcaattatacatttaatacgcgatagaaaacaaaatatagcgcgcaaactaggataaattatcgcgcgcggtgtcatctatgttactagatcgggaattctagtggccggcccagctgatatctagacccagctttcttgtacaaagtggccgttaacggatcggccagaatggcccggaccgggttaccgaattcgagctcggtaccctgggatccgatatcgatgggccctggccgaagcttggtcacccggtccgggcctagaaggccagcttcggccgccccgggcaactttattatacaaagttgatggtacggatccgtcgacggcgcgccgcggacctgaattccagcacactggcggccgttagtctaaaaacggcccctaactaacgcttagttgcccgctagattagtcccccgttagtgcctagttagacacacgacgaactaggggctactagtaacggccgccagtgtgctcggtacggccagaatggccatctggattcagcagggggtgattgcggttacatcatgtacggaaaaataattctaatccttgatttaaatttgaacttgactatttatttattctttatttcattttgtaaatcattttatgtatctcctggcaagcaattttatccaccttgcaccaacaccttcgggttccataatcaaaccaccttaacttcacaccatgctgtaactcacaccgcccagcatctccaatgtgaaagaagctaaaatttaataaacaatcatacgaagcagtgacaaaataccagatggtattaatgcttcgataaaattaattggaaagtataaaatggtagaaaataataaattataattaatttaagtaagataaaaaataattaaaaactaaaatgttaaaattttaaaaaaattattttaaataatatttaaaaacattaaaaatcattttaaaaaatttatttatagaacaattaaataaatatttcagctaataaaaaacaaaagcttacctagccttagaagacaacttgtccaacaattagatgatacccattgcccttacgttttctttaacatcaattattgtttttgtcaacaagctatcttttagttttattttattggtaaaaaatatgtcgccttcaagttgcatcatttaacacatctcgtcattagaaaaataaaactcttccctaaacgattagtagaaaaaatcattcgataataaataagaaagaaaaattagaaaaaaataacttcattttaaaaaaatcattaaggctatattttttaaatgactaattttatatagactgtaactaaaagtatacaatttattatgctatgtatcttaaagaattacttataaaaatctacggaagaatatcttacaaagtgaaaaacaaatgagaaagaatttagtgggatgattatgattttatttgaaaattgaaaaaataattattaaagactttagtggagtaagaaagctttcctattagtcttttcttatccataaaaaaaaaaaaaaaaatctagcgtgacagcttttccatagattttaataatgtaaaatactggtagcagccgaccgttcaggtaatggacactgtggtcctaacttgcaacgggtgcgggcccaatttaataacgccgtggtaacggataaagccaagcgtgaagcggtgaaggtacatctctgactccgtcaagattacgaaaccgtcaactacgaaggactccccgaaatatcatctgtgtcataaacaccaagtcacaccatacatgggcacgcgtcacaatatgattggagaacggttccaccgcatatgctataaaatgcccccacacccctcgaccctaatcgcacttcaattgcaatcaaattagttcattctctttgcgcagttccctacctctcctttcaaggttcgtagatttcttccgtttttttttcttcttctttattgtttgttctacatcagcatgatgttgatttgattgtgttttctatcgtttcatcgattataaattttcataatcagaagattcagcttttattaatgcaagaacgtccttaattgatgattttataaccgtaaattaggtctaattagagtttttttcataaagattttcagatccgtttacaacaagccttaattgttgattctgtagtcgtagattaaggtttttttcatgaactacttcagatccgttaaacaacagccttatttgttgatacttcagtcgtttttcaagaaattgttcagatccgttgataaaagccttattcgttgattctgtatggtatttcaagagatattgctcaggtcctttagcaactaccttatttgttgattctgtggccatagattaggattttttttcacgaaattgcttcttgaaattacgtgatggattttgattctgatttatcttgtgattgttgactctacagccatggctgcaactactcttacatctgctttacctggtgctttcagttcatcccagagaccaagtgctcctttcaacttacaaagatcacctagagtgcttagaaggttcaacagaaagacaggacgtcaacctcgtggacttgttcgtgctgcaaaggctcaagcggcgcaaaacctgccagagaaattcgatgaaacaagactctgggaggccctcaggggatttggggttagtccaagtagggttacttacgctcccgtcggattcggagattaccactggaccgtcacagatgaagacgggagaccttggttcgcaactgtcagtgacctcgaacacaaagagcattgcgggcagggagcacaagcagcccttaaaggactcagacaagctatggacactgccctcgcacttagagatagggacggactcagattcgtggttgctccagtggcagcaacagatgggggtggccctgtccttccccttgacgctaggtatgcactcacagtcttccctcacgtcccaggaagaacaggagagttcggacaaagactcacagaggcagagagggacagactgcttgctcttctggcagaactccacggaagaacacctcctgaaacaaccccaccagccgatatggaaccaccaggacttcctggtgttagagcagcactcgccgaaagtgaaggaccttggagtggaggaccatttgcagaacccgctagacttcttctcagagaacacgaggccacactgcacgcaagactcgctgaattcgaagccctcgtcgcaagagttaagggtcgtggagcacctcttgtcgttacccacggagaaccacacccaggcaacttgatcctcggagaggaaggctatctcctcgtggactgggatacagttggactggctccagctgaaagggatttgagtctcatctcagacgacccagctgacctcgcaagatacgcagagcttacaggaagaactccagacccagacgcactcgcactctatagactgcgttggagtctccttgatgtggctgagttcgtcgagtggttcagggctgaacaccaaagaacccaagacaccgagagtgcatggaaggggttcactgacacacttgggcaattggctgctggtggatcagctgcatagcaaacttatctctgttatgaatcagaagaagttcatgtctcgtttcatttaaaactttggtggtttgtgttttggggccttgtaaagcccctgatgaataattgttcaactatgtttccgttcctgtgttatacctttctttctaatgagtaatgacatcaaacttcttctgtattgaaattatgtccttgtgagtctctttatcatcgtttcgtctttacattatatgtgctacttttgtctaatgagcctgaaaagtggctccaatggtacgcactggaagatttgttggcttctggtagatatagcgacagtgttgagcttgtaatatcatgtctcttattgctaaattagttcctttcttaacagaaaccttcaaagtttttgtttttgttttcatttacctaatgtacacatacgctggccatgactaacaacatgtccaggcttagagcatatttttttctagcttaaattgttaacttgtcattcagtaaaatccgagaattgtgaagctctaattgaagctaattcgttttataaagtcagttaaaaagtatactaaattatccaacttttcttcaaaatctcaaaattctatgacaaaacgatagtctttgtttatgtcagtaccacaaagaggtggaaaaaaacaccaaaaaaacaataagcaaactatacactgagaagaaaaataaaagagagctcaatagatgttttatactaacggtagattagatcaaagatccaagctttactctacatagagcagaacccagaatcccttcatatctcttttattctagcaccgataatctactgaaaagaagacacttagagctctgtctctttgtcaaagaagtcccagccgtcatccagaagctccttacgttcattaacagaggccgcaattggatcgggtttacttattttgtgggtatctatacttttattagatttttaatcaggctcctgatttctttttatttcgattgaattcctgaacttgtattattcagtagatcgaataaattataaaaagataaaatcataaaataatattttatcctatcaatcatattaaagcaatgaatatgtaaaattaatcttatctttattttaaaaaatcatataggtttagtatttttttaaaaataaagataggattagttttactattcactgcttattacttttaaaaaaatcataaaggtttagtatttttttaaaataaatataggaatagttttactattcactgctttaatagaaaaatagtttaaaatttaagatagttttaatcccagcatttgccacgtttgaacgtgagccgaaacgatgtcgttacattatcttaacctagctgaaacgatgtcgtcataatatcgccaaatgccaactggactacgtcgaacccacaaatcccacaaagcgcgtgaaatcaaatcgctcaaaccacaaaaaagaacaacgcgtttgttacacgctcaatcccacgcgagtagagcacagtaaccttcaaataagcgaatggggcataatcagaaatccgaaataaacctaggggcattatcggaaatgaaaagtagctcactcaatataaaaatctaggaaccctagttttcgttatcactctgtgctccctcgctctatttctcagtctctgtgtttgcggctgaggattccgaacgagtgaccttcttcgtttctcgcaaaggtaacagcctctgctcttgtctcttcgattcgatctatgcctgtctcttatttacgatgatgtttcttcggttatgtttttttatttatgctttatgctgttgatgttcggttgtttgtttcgctttgtttttgtggttcagttttttaggattcttttggtttttgaatcgattaatcggaagagattttcgagttatttggtgtgttggaggtgaatcttttttttgaggtcatagatctgttgtatttgtgttataaacatgcgactttgtatgattttttacgaggttatgatgttctggttgttttattatgaatctgttgagacagaaccatgatttttgttgatgttcgtttacactattaaaggtttgttttaacaggattaaaagttttttaagcatgttgaaggagtcttgtagatatgtaaccgtcgatagtttttttgtgggtttgttcacatgttatcaagcttaatcttttactatgtatgcgaccatatctggatccagcaaaggcgattttttaattccttgtgaaacttttgtaatatgaagttgaaattttgttattggtaaactataaatgtgtgaagttggagtatacctttaccttcttatttggctttgtgatagtttaatttatatgtattttgagttctgacttgtatttctttgaattgattctagtttaagtaatcatggcctcctccgagaacgtcatcaccgagttcatgcgcttcaaggtgcgcatggagggcaccgtgaacggccacgagttcgagatcgagggcgagggcgagggccgcccctacgagggccacaacaccgtgaagctgaaggtgacgaagggcggccccctgcccttcgcctgggacatcctgtccccccagttccagtacggctccaaggtgtacgtgaagcaccccgccgacatccccgactacaagaagctgtccttccccgagggcttcaagtgggagcgcgtgatgaacttcgaggacggcggcgtggcgaccgtgacccaggactcctccctgcaggacggctgcttcatctacaaggtgaagttcatcggcgtgaacttcccctccgacggccccgtgatgcagaagaagaccatgggctgggaggcctccaccgagcgcctgtacccccgcgacggcgtgctgaagggcgagacccacaaggccctgaagctgaaggacggcggccactacctggtggagttcaagtccatctacatggccaagaagcccgtgcagctgcccggctactactacgtggacgccaagctggacatcacctcccacaacgaggactacaccatcgtggagcagtacgagcgcaccgagggccgccaccacctgttcctgtagttttgtgatctgatgataagtggttggttcgtgtctcatgcacttgggaggtgatctatttcacctggtgtagtttgtgtttccgtcagttggaaaaacttatccctatcgatttcgttttcattttctgcttttcttttatgtaccttcgtttgggcttgtaacgggcctttgtatttcaactctcaataataatccaagtgcatgttaaacaatttgtcatctgtttcggctttgatatactactggtgaagatgggccgtactactgcatcacaacgaaaaataataataagatgaaaaacttgaagtggaaaaaaaaaaaaacttgaatgttcactactactcattgaccataatgtttaacatacatagctcaatagtatttttgtgaatatggcaacacaaacagtccaaaacaattgtctcttactataccaaaccaagggcgccgcttgtttgccactctttgtgtgcaatagtgtgattaccacatctccacattcaatatattccctgaattatctgacgattttgatggctcactgttttcccaagtcttgaattgtcttctgtgcgccagtcaaatgcatatgtgttgagtttatcttttaaatatcaagcttttgtttttaacttttgtttgtaaccaaaaactcacagtaggagtttgatcacataattttatgtttgcctttgcaatttctagtgagtctttgattaaaagcttgaaaagaaaatgcagccaagcttaccaagtaagttatgtgtattaaccagaggaagagagaatcttgcaaaatttcaacaaacacaaaaagaagtattactacgattggtggagaaagaaaacgattccaaatcttgaactgttgttgtaaaagcatagcagaaagtgggagacaaccgaaatagaaatgactataacttaatttaatgttatcattataatttcttctagcaaatatttagaaagtaaatatcacatcaacctttaatgtaattaagctttctctttttgattcatgtgagatgaaaagaaaaaaaagaagagaaaagtgtagaaaacacatcatttctaagctgaagctgaggtacaaattaattaataagtgactagggtcacgtgaccctagtcacttatgattccgatgacttcgtaggttcctagctcaagccgctcgtgtccaagcgtcacttacgattagctaatgattacggcatctaggaccgactagttcttatgtgcttctagtctccaaatgtggttgatagttattttgctctaagatcaacagtaatgaagtataaatcatcgttgtggtgtgctactcggttaattgagcattaacacacacaaacatgacgaggatggtataatctccaaaaatgtgtactttgttaggtgggaccctatagccttgattaatgtgctatgttaggcatgcctggaaacgtgtgacgcatatgttttgtgaacctgttgatattatatgtgcttttatattaccatattttattaaaatactaatatttattactagtaagatataacattctatctagcttaaaaactaaccataaatattccataataactagatttaccaaactaatatactaaatatacataataaatacaaaattaacaagacaataatcaatatttatgagcttaatatatttagacattatggttggtcgacgataatcatgctaacttttcgtaattgcttgattgaaatatgcttagaataatgcctctttgttctacatggcaaatagggaccattatggtgtaacaccctgggaaccacaaacaccccgaaatgctactaaactacacaactaaccttcatatataaaatttcgacagcatctcctttgaaaatttgcatagacgtggaagcaacagagtataaacagatctagctagctaagtttaaacggccggccaaacgtgcaagcgctactagacaattcagtacattaaaaacgtccgcaatgtgttattaagttgtctaagcgtcaatttatttacaattgaatatatcctgcca

SEQ ID NO: 172 - DNA, 16238 bp, Artificial Sequence
  RV027338 T-DNA
caaacaaacatacacagcgatttattcacacgaacccgaattacaacggtatatatcctgtcagccaacaccaaaacatcaaaaaaatcgggatcaggatcaggatctgcggccgcatcctgcaggtttaaacggccggccttcactagctagctgctaagctcaaacgagcaggaagcaacgagagggtggcgcgcgaccgacgtgcgtacgtagcatgagcctgagtggagacgttggacgtgtatgtatatacctctctgcgtgttaactatgtacgtaagcggcaggcagtgcaataagtgtggctctgtagtatgtacgtgcgggtacgatgctgtaagctactgaggcaagtccataaataaataatgacacgtgcgtgttctataatctcttcgcttcttcatttgtccccttgcggagtttggcatccattgatgccgttacgctgagaacagacacagcagacgaaccaaaagtgagttcttgtatgaaactatgacccttcatcgctaggctcaaacagcaccccgtacgaacacagcaaattagtcatctaactattagcccctacatgtttcagacgatacataaatatagcccatccttagcaattagctattggccctgcccatcccaagcaatgatctcgaagtatttttaatatatagtatttttaatatgtagcttttaaaattagaagataattttgagacaaaaatctccaagtatttttttgggtattttttactgcctccgtttttctttatttctcgtcacctagtttaattttgtgctaatcggctataaacgaaacagagagaaaagttactctaaaagcaactccaacagattagatataaatcttatatcctgcctagagctgttaaaaagatagacaactttagtggattagtgtatgcaacaaactctccaaatttaagtatcccaactacccaacgcatatcgttcccttttcattggcgcacgaactttcacctgctatagccgacgtacatgttcgttttttttgggcggcgcttactttcttccccgttcgttctcagcatcgcaactcaatttgttatggcggagaagcccttgtatcccaggtagtaatgcacagatatgcattattattattcataaaatcgagctagttaccctatgaggtgacatgaagcgctcacggttactatgacggttagcttcacgactgttggtggcagtagcgtacgacttagctatagttccggacttacctaactgactagagtcacacttagctgaccctagtcacttaggcgcgccaagcttggatctcctgcaggatctggccggccggatgggcggatctcgtacctcaactttgtatagaaaagttgggccagaatggcccggaccgggttaccaagcggccgcatatcggttgttgacgattaaccatgcaaaaaagaaacattaattgcgaatgtaaataacaaaacatgtaactcttgtagatatacatgtatcgacatttaaacccgaatatatatgtatacctataatttctctgattttcacgctacctgccacgtacatgggtgataggtccaaactcacaagtaaaagtttacgtacagtgaattcgtctttttgggtataaacgtacatttaatttacacgtaagaaaggattaccaattctttcatttatggtaccagacagagttaaggcaaacaagagaaacatatagagttttgatatgttttcttggataaatattaaattgatgcaatatttagggatggacacaaggtaatatatgccttttaaggtatatgtgctatatgaatcgtttcgcatgggtactaaaattatttgtccttactttatataaacaaattccaacaaaatcaagtttttgctaaaactagtttatttgcgggttatttaattacctatcatattacttgtaatatcattcgtatgttaacgggtaaaccaaaccaaaccggatattgaactattaaaaatcttgtaaatttgacacaaactaatgaatatctaaattatgttactgctatgataacgaccatttttgtttttgagaaccataatataaattacaggtacgtgacaagtactaagtatttatatccacctttagtcacagtaccaatattgcgcctaccgggcaacgtgaacgtgatcatcaaatcaaagtagttaccaaacgctttgatctcgataaaactaaaagctgacacgtcttgctgtttcttaatttatttctcttacaacgacaattttgagaaatatgaaatttttatatcgaaagggaacagtccttatcatttgctcccatcacttgcttttgtctagttacaactggaaatcgaagagaagtattacaaaaacatttttctcgtcatttataaaaaaatgacaaaaaattaaatagagagcaaagcaagagcgttgggtgacgttggtctcttcattaactcctctcatctaccccttcctctgttcgcctttatatccttcaccttccctctctcatcttcattaactcatcttcaaaaataccctaatcacattttgtaacaataatacaattatacattaaaactctccgacgccatggaaactcaacaacaacaagcagatattcaagattttgggaacaaaaacagtaacacctatgcatgcaggcaaagcagtactaggtggacacccacaagtgatcagatcagaatactgaaagagctctactacaacaatggaatcagatcaccaactgctgatcagattcagagaatcgctgctcaactcagacagtacggcaagattgaaggcaagaacgtgttttattggtttcagaaccataaagctcgtgaacgccagaagaaacggttcactcctactgctcctccaccaccgtctcacttctccgatcatattaaccaccatcttcccaacgctgcccccatgcagattccgtctcaccaccaccactaccaccatcaagaaccaccacatgtctatgctcaccctcacaaactctacaccactcatcacattggggttggttcttcttcacaaggagtgatgggtgtagggtgtggctatggatctgttgctatggagaagagtttcaggaagtgttcaatatcaccaccgggagagagtaaggccacaggaggaattggccggaatatcggttcaagatcacggataagtgtcgattcgtgttccttcttcgacacaattaagccaaagacatatgagatgtttgagaatcatgatcaagatgaagaacaaggagagccttcaactgagatcgaaacacttccattattcccgattcacgacggcaaccatcatgatttcttcggcatgaggacggcaaatctgcaattggagcaaggcactggaggttactacactggaggaagctggtatcggtctgatgagagggcgtctcttgagctcagtctcaactcatatggttattataactaattcgaactggccaggtacctgacatcttatagtctgcaacctctcgtgtctgaattcctatctttatcaagtgttattgcttccacgactataggacagctttcgtcgaaaggttttgctcatgtgatctcgaaggattcatctagtctgatttttcgtgacttgtatcggttttattggattcatccaacatatatcaataaaaaatgagttgtgtttcctttcttcctagttcagttaaaattatttccctcctgcgcttgtgctgtaattgtctgtgtacctgttgtttgtgactgtgttagttcccttggatatgatttcgtatttgatatgtacatggagatagcttagcttcattattggagtatgaagttagtatgacatagtcactctcctggaaaattgacactgcaaaccatatttttattctgaaccacaaatcctagtcagtccgctggcatatgccgtccgtttgctgaatccagaacgtgggtttggagatgtacggctgagatgcctctatgcgaaggggatttcgtggtgaaacgagatgggagtagagcaacgcccgtggaagatgcttcaaacttccacacttttgagcaacgatcggcagtagtaaggtagacgatttcaagatcaaagcatatgaagataaacaacatcaacaacaaaatttgttggggttctatagagagaaacagagctacatacatacactgttttgtatctaccatctgagatgatgaaaagatgaaaaactaaagaatgccccggcgccaacgccaggacacgccgcgcgcgcgtcacccgagccatctcttgacccagccggcgctgtatatttacacacgttgcagcatcgatcaccacctgttcgatcgcgtcgccgtcaccaagcttggcgcgccggtcacccggtccgggcctagaaggccacccggggctcggcgttaggcttttagtccgctaggtggctagaccgaggttaggacgctagttcactaggggcctagtggtgttttaaggatgggcaagtttgtacaaaaaagcaggctggcgccggaaccaattcagtcgagtgcggccgccagtgtgatggatatctcgacccgggtgattgcggttacatcatgtacggaaaaataattctaatccttgatttaaatttgaacttgactatttatttattctttatttcattttgtaaatcattttatgtatctcctggcaagcaattttatccaccttgcaccaacaccttcgggttccataatcaaaccaccttaacttcacaccatgctgtaactcacaccgcccagcatctccaatgtgaaagaagctaaaatttaataaacaatcatacgaagcagtgacaaaataccagatggtattaatgcttcgataaaattaattggaaagtataaaatggtagaaaataataaattataattaatttaagtaagataaaaaataattaaaaactaaaatgttaaaattttaaaaaaattattttaaataatatttaaaaacattaaaaatcattttaaaaaatttatttatagaacaattaaataaatatttcagctaataaaaaacaaaagcttacctagccttagaagacaacttgtccaacaattagatgatacccattgcccttacgttttctttaacatcaattattgtttttgtcaacaagctatcttttagttttattttattggtaaaaaatatgtcgccttcaagttgcatcatttaacacatctcgtcattagaaaaataaaactcttccctaaacgattagtagaaaaaatcattcgataataaataagaaagaaaaattagaaaaaaataacttcattttaaaaaaatcattaaggctatattttttaaatgactaattttatatagactgtaactaaaagtatacaatttattatgctatgtatcttaaagaattacttataaaaatctacggaagaatatcttacaaagtgaaaaacaaatgagaaagaatttagtgggatgattatgattttatttgaaaattgaaaaaataattattaaagactttagtggagtaagaaagctttcctattagtcttttcttatccataaaaaaaaaaaaaaaaatctagcgtgacagcttttccatagattttaataatgtaaaatactggtagcagccgaccgttcaggtaatggacactgtggtcctaacttgcaacgggtgcgggcccaatttaataacgccgtggtaacggataaagccaagcgtgaagcggtgaaggtacatctctgactccgtcaagattacgaaaccgtcaactacgaaggactccccgaaatatcatctgtgtcataaacaccaagtcacaccatacatgggcacgcgtcacaatatgattggagaacggttccaccgcatatgctataaaatgcccccacacccctcgaccctaatcgcacttcaattgcaatcaaattagttcattctctttgcgcagttccctacctctcctttcaaggttcgtagatttcttccgtttttttttcttcttctttattgtttgttctacatcagcatgatgttgatttgattgtgttttctatcgtttcatcgattataaattttcataatcagaagattcagcttttattaatgcaagaacgtccttaattgatgattttataaccgtaaattaggtctaattagagtttttttcataaagattttcagatccgtttacaacaagccttaattgttgattctgtagtcgtagattaaggtttttttcatgaactacttcagatccgttaaacaacagccttatttgttgatacttcagtcgtttttcaagaaattgttcagatccgttgataaaagccttattcgttgattctgtatggtatttcaagagatattgctcaggtcctttagcaactaccttatttgttgattctgtggccatagattaggattttttttcacgaaattgcttcttgaaattacgtgatggattttgattctgatttatcttgtgattgttgactctacagccatggcccacagcaagcacggcctgaaggaggagatgaccatgaagtaccacatggagggctgcgtgaacggccacaagttcgtgatcaccggcgagggcatcggctaccccttcaagggcaagcagaccatcaacctgtgcgtgatcgagggcggccccctgcccttcagcgaggacatcctgagcgccggcttcaagtacggcgaccggatcttcaccgagtacccccaggacatcgtggactacttcaagaacagctgccccgccggctacacctggggccggagcttcctgttcgaggacggcgccgtgtgcatctgtaacgtggacatcaccgtgagcgtgaaggagaactgcatctaccacaagagcatcttcaacggcgtgaacttccccgccgacggccccgtgatgaagaagatgaccaccaactgggaggccagctgcgagaagatcatgcccgtgcctaagcagggcatcctgaagggcgacgtgagcatgtacctgctgctgaaggacggcggccggtaccggtgccagttcgacaccgtgtacaaggccaagagcgtgcccagcaagatgcccgagtggcacttcatccagcacaagctgctgcgggaggaccggagcgacgccaagaaccagaagtggcagctgaccgagcacgccatcgccttccccagcgccctggcctgagagctcgaatttccccgatcgttcaaacatttggcaataaagtttcttaagattgaatcctgttgccggtcttgcgatgattatcatataatttctgttgaattacgttaagcatgtaataattaacatgtaatgcatgacgttatttatgagatgggtttttatgattagagtcccgcaattatacatttaatacgcgatagaaaacaaaatatagcgcgcaaactaggataaattatcgcgcgcggtgtcatctatgttactagatcgggaattctagtggccggcccagctgatatctagacccagctttcttgtacaaagtggccgttaacggatcggccagaatggcccggaccgggttaccgaattcgagctcggtaccctgggatccgatatcgatgggccctggccgaagcttggtcacccggtccgggcctagaaggccagcttcggccgccccgggcaactttattatacaaagttgatggtacggatccgtcgacggcgcgccgcggacctgaattccagcacactggcggccgttagtctaaaaacggcccctaactaacgcttagttgcccgctagattagtcccccgttagtgcctagttagacacacgacgaactaggggctactagtaacggccgccagtgtgctcggtacggccagaatggccatctggattcagcagggggtgattgcggttacatcatgtacggaaaaataattctaatccttgatttaaatttgaacttgactatttatttattctttatttcattttgtaaatcattttatgtatctcctggcaagcaattttatccaccttgcaccaacaccttcgggttccataatcaaaccaccttaacttcacaccatgctgtaactcacaccgcccagcatctccaatgtgaaagaagctaaaatttaataaacaatcatacgaagcagtgacaaaataccagatggtattaatgcttcgataaaattaattggaaagtataaaatggtagaaaataataaattataattaatttaagtaagataaaaaataattaaaaactaaaatgttaaaattttaaaaaaattattttaaataatatttaaaaacattaaaaatcattttaaaaaatttatttatagaacaattaaataaatatttcagctaataaaaaacaaaagcttacctagccttagaagacaacttgtccaacaattagatgatacccattgcccttacgttttctttaacatcaattattgtttttgtcaacaagctatcttttagttttattttattggtaaaaaatatgtcgccttcaagttgcatcatttaacacatctcgtcattagaaaaataaaactcttccctaaacgattagtagaaaaaatcattcgataataaataagaaagaaaaattagaaaaaaataacttcattttaaaaaaatcattaaggctatattttttaaatgactaattttatatagactgtaactaaaagtatacaatttattatgctatgtatcttaaagaattacttataaaaatctacggaagaatatcttacaaagtgaaaaacaaatgagaaagaatttagtgggatgattatgattttatttgaaaattgaaaaaataattattaaagactttagtggagtaagaaagctttcctattagtcttttcttatccataaaaaaaaaaaaaaaaatctagcgtgacagcttttccatagattttaataatgtaaaatactggtagcagccgaccgttcaggtaatggacactgtggtcctaacttgcaacgggtgcgggcccaatttaataacgccgtggtaacggataaagccaagcgtgaagcggtgaaggtacatctctgactccgtcaagattacgaaaccgtcaactacgaaggactccccgaaatatcatctgtgtcataaacaccaagtcacaccatacatgggcacgcgtcacaatatgattggagaacggttccaccgcatatgctataaaatgcccccacacccctcgaccctaatcgcacttcaattgcaatcaaattagttcattctctttgcgcagttccctacctctcctttcaaggttcgtagatttcttccgtttttttttcttcttctttattgtttgttctacatcagcatgatgttgatttgattgtgttttctatcgtttcatcgattataaattttcataatcagaagattcagcttttattaatgcaagaacgtccttaattgatgattttataaccgtaaattaggtctaattagagtttttttcataaagattttcagatccgtttacaacaagccttaattgttgattctgtagtcgtagattaaggtttttttcatgaactacttcagatccgttaaacaacagccttatttgttgatacttcagtcgtttttcaagaaattgttcagatccgttgataaaagccttattcgttgattctgtatggtatttcaagagatattgctcaggtcctttagcaactaccttatttgttgattctgtggccatagattaggattttttttcacgaaattgcttcttgaaattacgtgatggattttgattctgatttatcttgtgattgttgactctacagccatggctgcaactactcttacatctgctttacctggtgctttcagttcatcccagagaccaagtgctcctttcaacttacaaagatcacctagagtgcttagaaggttcaacagaaagacaggacgtcaacctcgtggacttgttcgtgctgcaaaggctcaagcggcgcaaaacctgccagagaaattcgatgaaacaagactctgggaggccctcaggggatttggggttagtccaagtagggttacttacgctcccgtcggattcggagattaccactggaccgtcacagatgaagacgggagaccttggttcgcaactgtcagtgacctcgaacacaaagagcattgcgggcagggagcacaagcagcccttaaaggactcagacaagctatggacactgccctcgcacttagagatagggacggactcagattcgtggttgctccagtggcagcaacagatgggggtggccctgtccttccccttgacgctaggtatgcactcacagtcttccctcacgtcccaggaagaacaggagagttcggacaaagactcacagaggcagagagggacagactgcttgctcttctggcagaactccacggaagaacacctcctgaaacaaccccaccagccgatatggaaccaccaggacttcctggtgttagagcagcactcgccgaaagtgaaggaccttggagtggaggaccatttgcagaacccgctagacttcttctcagagaacacgaggccacactgcacgcaagactcgctgaattcgaagccctcgtcgcaagagttaagggtcgtggagcacctcttgtcgttacccacggagaaccacacccaggcaacttgatcctcggagaggaaggctatctcctcgtggactgggatacagttggactggctccagctgaaagggatttgagtctcatctcagacgacccagctgacctcgcaagatacgcagagcttacaggaagaactccagacccagacgcactcgcactctatagactgcgttggagtctccttgatgtggctgagttcgtcgagtggttcagggctgaacaccaaagaacccaagacaccgagagtgcatggaaggggttcactgacacacttgggcaattggctgctggtggatcagctgcatagcaaacttatctctgttatgaatcagaagaagttcatgtctcgtttcatttaaaactttggtggtttgtgttttggggccttgtaaagcccctgatgaataattgttcaactatgtttccgttcctgtgttatacctttctttctaatgagtaatgacatcaaacttcttctgtattgaaattatgtccttgtgagtctctttatcatcgtttcgtctttacattatatgtgctacttttgtctaatgagcctgaaaagtggctccaatggtacgcactggaagatttgttggcttctggtagatatagcgacagtgttgagcttgtaatatcatgtctcttattgctaaattagttcctttcttaacagaaaccttcaaagtttttgtttttgttttcatttacctaatgtacacatacgctggccatgactaacaacatgtccaggcttagagcatatttttttctagcttaaattgttaacttgtcattcagtaaaatccgagaattgtgaagctctaattgaagctaattcgttttataaagtcagttaaaaagtatactaaattatccaacttttcttcaaaatctcaaaattctatgacaaaacgatagtctttgtttatgtcagtaccacaaagaggtggaaaaaaacaccaaaaaaacaataagcaaactatacactgagaagaaaaataaaagagagctcaatagatgttttatactaacggtagattagatcaaagatccaagctttactctacatagagcagaacccagaatcccttcatatctcttttattctagcaccgataatctactgaaaagaagacacttagagctctgtctctttgtcaaagaagtcccagccgtcatccagaagctccttacgttcattaacagaggccgcaattggatcgggtttacttattttgtgggtatctatacttttattagatttttaatcaggctcctgatttctttttatttcgattgaattcctgaacttgtattattcagtagatcgaataaattataaaaagataaaatcataaaataatattttatcctatcaatcatattaaagcaatgaatatgtaaaattaatcttatctttattttaaaaaatcatataggtttagtatttttttaaaaataaagataggattagttttactattcactgcttattacttttaaaaaaatcataaaggtttagtatttttttaaaataaatataggaatagttttactattcactgctttaatagaaaaatagtttaaaatttaagatagttttaatcccagcatttgccacgtttgaacgtgagccgaaacgatgtcgttacattatcttaacctagctgaaacgatgtcgtcataatatcgccaaatgccaactggactacgtcgaacccacaaatcccacaaagcgcgtgaaatcaaatcgctcaaaccacaaaaaagaacaacgcgtttgttacacgctcaatcccacgcgagtagagcacagtaaccttcaaataagcgaatggggcataatcagaaatccgaaataaacctaggggcattatcggaaatgaaaagtagctcactcaatataaaaatctaggaaccctagttttcgttatcactctgtgctccctcgctctatttctcagtctctgtgtttgcggctgaggattccgaacgagtgaccttcttcgtttctcgcaaaggtaacagcctctgctcttgtctcttcgattcgatctatgcctgtctcttatttacgatgatgtttcttcggttatgtttttttatttatgctttatgctgttgatgttcggttgtttgtttcgctttgtttttgtggttcagttttttaggattcttttggtttttgaatcgattaatcggaagagattttcgagttatttggtgtgttggaggtgaatcttttttttgaggtcatagatctgttgtatttgtgttataaacatgcgactttgtatgattttttacgaggttatgatgttctggttgttttattatgaatctgttgagacagaaccatgatttttgttgatgttcgtttacactattaaaggtttgttttaacaggattaaaagttttttaagcatgttgaaggagtcttgtagatatgtaaccgtcgatagtttttttgtgggtttgttcacatgttatcaagcttaatcttttactatgtatgcgaccatatctggatccagcaaaggcgattttttaattccttgtgaaacttttgtaatatgaagttgaaattttgttattggtaaactataaatgtgtgaagttggagtatacctttaccttcttatttggctttgtgatagtttaatttatatgtattttgagttctgacttgtatttctttgaattgattctagtttaagtaatcatggcctcctccgagaacgtcatcaccgagttcatgcgcttcaaggtgcgcatggagggcaccgtgaacggccacgagttcgagatcgagggcgagggcgagggccgcccctacgagggccacaacaccgtgaagctgaaggtgacgaagggcggccccctgcccttcgcctgggacatcctgtccccccagttccagtacggctccaaggtgtacgtgaagcaccccgccgacatccccgactacaagaagctgtccttccccgagggcttcaagtgggagcgcgtgatgaacttcgaggacggcggcgtggcgaccgtgacccaggactcctccctgcaggacggctgcttcatctacaaggtgaagttcatcggcgtgaacttcccctccgacggccccgtgatgcagaagaagaccatgggctgggaggcctccaccgagcgcctgtacccccgcgacggcgtgctgaagggcgagacccacaaggccctgaagctgaaggacggcggccactacctggtggagttcaagtccatctacatggccaagaagcccgtgcagctgcccggctactactacgtggacgccaagctggacatcacctcccacaacgaggactacaccatcgtggagcagtacgagcgcaccgagggccgccaccacctgttcctgtagttttgtgatctgatgataagtggttggttcgtgtctcatgcacttgggaggtgatctatttcacctggtgtagtttgtgtttccgtcagttggaaaaacttatccctatcgatttcgttttcattttctgcttttcttttatgtaccttcgtttgggcttgtaacgggcctttgtatttcaactctcaataataatccaagtgcatgttaaacaatttgtcatctgtttcggctttgatatactactggtgaagatgggccgtactactgcatcacaacgaaaaataataataagatgaaaaacttgaagtggaaaaaaaaaaaaacttgaatgttcactactactcattgaccataatgtttaacatacatagctcaatagtatttttgtgaatatggcaacacaaacagtccaaaacaattgtctcttactataccaaaccaagggcgccgcttgtttgccactctttgtgtgcaatagtgtgattaccacatctccacattcaatatattccctgaattatctgacgattttgatggctcactgttttcccaagtcttgaattgtcttctgtgcgccagtcaaatgcatatgtgttgagtttatcttttaaatatcaagcttttgtttttaacttttgtttgtaaccaaaaactcacagtaggagtttgatcacataattttatgtttgcctttgcaatttctagtgagtctttgattaaaagcttgaaaagaaaatgcagccaagcttaccaagtaagttatgtgtattaaccagaggaagagagaatcttgcaaaatttcaacaaacacaaaaagaagtattactacgattggtggagaaagaaaacgattccaaatcttgaactgttgttgtaaaagcatagcagaaagtgggagacaaccgaaatagaaatgactataacttaatttaatgttatcattataatttcttctagcaaatatttagaaagtaaatatcacatcaacctttaatgtaattaagctttctctttttgattcatgtgagatgaaaagaaaaaaaagaagagaaaagtgtagaaaacacatcatttctaagctgaagctgaggtacaaattaattaataagtgactagggtcacgtgaccctagtcacttatgattccgatgacttcgtaggttcctagctcaagccgctcgtgtccaagcgtcacttacgattagctaatgattacggcatctaggaccgactagttcttatgtgcttctagtctccaaatgtggttgatagttattttgctctaagatcaacagtaatgaagtataaatcatcgttgtggtgtgctactcggttaattgagcattaacacacacaaacatgacgaggatggtataatctccaaaaatgtgtactttgttaggtgggaccctatagccttgattaatgtgctatgttaggcatgcctggaaacgtgtgacgcatatgttttgtgaacctgttgatattatatgtgcttttatattaccatattttattaaaatactaatatttattactagtaagatataacattctatctagcttaaaaactaaccataaatattccataataactagatttaccaaactaatatactaaatatacataataaatacaaaattaacaagacaataatcaatatttatgagcttaatatatttagacattatggttggtcgacgataatcatgctaacttttcgtaattgcttgattgaaatatgcttagaataatgcctctttgttctacatggcaaatagggaccattatggtgtaacaccctgggaaccacaaacaccccgaaatgctactaaactacacaactaaccttcatatataaaatttcgacagcatctcctttgaaaatttgcatagacgtggaagcaacagagtataaacagatctagctagctaagtttaaacggccggccaaacgtgcaagcgctactagacaattcagtacattaaaaacgtccgcaatgtgttattaagttgtctaagcgtcaatttatttacaattgaatatatcctgcca

SEQ ID NO: 173 - DNA, 16534 bp, Artificial Sequence
  RV027340 T-DNA
caaacaaacatacacagcgatttattcacacgaacccgaattacaacggtatatatcctgtcagccaacaccaaaacatcaaaaaaatcgggatcaggatcaggatctgcggccgcatcctgcaggtttaaacggccggccttcactagctagctgctaagctcaaacgagcaggaagcaacgagagggtggcgcgcgaccgacgtgcgtacgtagcatgagcctgagtggagacgttggacgtgtatgtatatacctctctgcgtgttaactatgtacgtaagcggcaggcagtgcaataagtgtggctctgtagtatgtacgtgcgggtacgatgctgtaagctactgaggcaagtccataaataaataatgacacgtgcgtgttctataatctcttcgcttcttcatttgtccccttgcggagtttggcatccattgatgccgttacgctgagaacagacacagcagacgaaccaaaagtgagttcttgtatgaaactatgacccttcatcgctaggctcaaacagcaccccgtacgaacacagcaaattagtcatctaactattagcccctacatgtttcagacgatacataaatatagcccatccttagcaattagctattggccctgcccatcccaagcaatgatctcgaagtatttttaatatatagtatttttaatatgtagcttttaaaattagaagataattttgagacaaaaatctccaagtatttttttgggtattttttactgcctccgtttttctttatttctcgtcacctagtttaattttgtgctaatcggctataaacgaaacagagagaaaagttactctaaaagcaactccaacagattagatataaatcttatatcctgcctagagctgttaaaaagatagacaactttagtggattagtgtatgcaacaaactctccaaatttaagtatcccaactacccaacgcatatcgttcccttttcattggcgcacgaactttcacctgctatagccgacgtacatgttcgttttttttgggcggcgcttactttcttccccgttcgttctcagcatcgcaactcaatttgttatggcggagaagcccttgtatcccaggtagtaatgcacagatatgcattattattattcataaaatcgagctagttaccctatgaggtgacatgaagcgctcacggttactatgacggttagcttcacgactgttggtggcagtagcgtacgacttagctatagttccggacttacctaactgactagagtcacacttagctgaccctagtcacttaggcgcgccaagcttggatctcctgcaggatctggccggccggatgggcggatctcgtacctcaactttgtatagaaaagttgggccagaatggcccggaccgggttaccaagcggccgctccattaattcatgtacacaaatttatttgtttaaagtatcattggatccattacacttcagttttcttagcatctttataaaactctcactttcatgatgttttttttttataatttaatatatcctgtatgttgaattttcagttagtcatctatattttgtcttaaattttgccttctttagcattaattaattgatttcttgcctctaatatctttcattcctctcctaatttgctttctgactttctgatttattgtattcttctttaaataatcttatcaatttctgcatagtcagagatgaaaccttcaagaaaacaataaagaggaaagattaaaggttagtattcccttgcctaccaaaaaaaacagaaaggtttgtattctcttcgtatatccttattttcattatacgtttggttttatatataaacacgtgtatatactttatagtagtagtatacatttacatattaatgtgtgtaataaaaacgtttaaatacgatgatgatgataagaaatagctggaaaaaattaatacatcacccaggccttatgtcacgttggttgtaagttgtataataactatatgttggtccgtcgcacaggtgcacagatataatactatttttttcatttcaatttttttttctttcttaatcgccaaatagtagtttacactttttcctgaagagtttttattttttgaaaatctactaatgattatatttaattaaattttgttttgttctcacgaaaatattgtttttttaataaacaggatagagttgggaatttatttgtacctactttttcccattttatttgctttgaacaaatgagtccaacatttctcttttcgtcttctctttcctatcccatctaaatcaaaactgatcaaaatacctcgaaattttaaattaaatcaccatccatcaaagctattatagtgtagaaattttaaagttttttctttggacaacaattgatttccatctacactacatatgatatgactcttgaatcaatcatagtttttatttcagtctgctgattagtttttttcttttcttttaaaagggtaaaaaatcggtagtttcgaataattttgagtatgtgaaaattcattatttttgggttggttattcaataacaaattaatttgtgattgtgatgtcttttttatgcaaggctcttttttcttgctttcaattagtgggtcctttgtttcctacaatcatctccaattcttctgtttgcttatatcattttgtatgatcttcaagaagaaagataaacgactccgaagaaagatttaagttattgttgttcatacaaaaagaaggttgtaaagttgttgacgtggacaaaagtattgccatatttttccagcctcgaagaaatttcccttcttcttcaaaccctaaattttgacaaaactctctacttttttttgcttctagggtttgctttcagtttccggagtataagaaaagccatggaaactcaacaacaacaagcagatattcaagattttgggaacaaaaacagtaacacctatgcatgcaggcaaagcagtactaggtggacacccacaagtgatcagatcagaatactgaaagagctctactacaacaatggaatcagatcaccaactgctgatcagattcagagaatcgctgctcaactcagacagtacggcaagattgaaggcaagaacgtgttttattggtttcagaaccataaagctcgtgaacgccagaagaaacggttcactcctactgctcctccaccaccgtctcacttctccgatcatattaaccaccatcttcccaacgctgcccccatgcagattccgtctcaccaccaccactaccaccatcaagaaccaccacatgtctatgctcaccctcacaaactctacaccactcatcacattggggttggttcttcttcacaaggagtgatgggtgtagggtgtggctatggatctgttgctatggagaagagtttcaggaagtgttcaatatcaccaccgggagagagtaaggccacaggaggaattggccggaatatcggttcaagatcacggataagtgtcgattcgtgttccttcttcgacacaattaagccaaagacatatgagatgtttgagaatcatgatcaagatgaagaacaaggagagccttcaactgagatcgaaacacttccattattcccgattcacgacggcaaccatcatgatttcttcggcatgaggacggcaaatctgcaattggagcaaggcactggaggttactacactggaggaagctggtatcggtctgatgagagggcgtctcttgagctcagtctcaactcatatggttattataactaattcgaactggccaggtacctgacatcttatagtctgcaacctctcgtgtctgaattcctatctttatcaagtgttattgcttccacgactataggacagctttcgtcgaaaggttttgctcatgtgatctcgaaggattcatctagtctgatttttcgtgacttgtatcggttttattggattcatccaacatatatcaataaaaaatgagttgtgtttcctttcttcctagttcagttaaaattatttccctcctgcgcttgtgctgtaattgtctgtgtacctgttgtttgtgactgtgttagttcccttggatatgatttcgtatttgatatgtacatggagatagcttagcttcattattggagtatgaagttagtatgacatagtcactctcctggaaaattgacactgcaaaccatatttttattctgaaccacaaatcctagtcagtccgctggcatatgccgtccgtttgctgaatccagaacgtgggtttggagatgtacggctgagatgcctctatgcgaaggggatttcgtggtgaaacgagatgggagtagagcaacgcccgtggaagatgcttcaaacttccacacttttgagcaacgatcggcagtagtaaggtagacgatttcaagatcaaagcatatgaagataaacaacatcaacaacaaaatttgttggggttctatagagagaaacagagctacatacatacactgttttgtatctaccatctgagatgatgaaaagatgaaaaactaaagaatgccccggcgccaacgccaggacacgccgcgcgcgcgtcacccgagccatctcttgacccagccggcgctgtatatttacacacgttgcagcatcgatcaccacctgttcgatcgcgtcgccgtcaccaagcttggcgcgccggtcacccggtccgggcctagaaggccacccggggctcggcgttaggcttttagtccgctaggtggctagaccgaggttaggacgctagttcactaggggcctagtggtgttttaaggatgggcaagtttgtacaaaaaagcaggctggcgccggaaccaattcagtcgagtgcggccgccagtgtgatggatatctcgacccgggtgattgcggttacatcatgtacggaaaaataattctaatccttgatttaaatttgaacttgactatttatttattctttatttcattttgtaaatcattttatgtatctcctggcaagcaattttatccaccttgcaccaacaccttcgggttccataatcaaaccaccttaacttcacaccatgctgtaactcacaccgcccagcatctccaatgtgaaagaagctaaaatttaataaacaatcatacgaagcagtgacaaaataccagatggtattaatgcttcgataaaattaattggaaagtataaaatggtagaaaataataaattataattaatttaagtaagataaaaaataattaaaaactaaaatgttaaaattttaaaaaaattattttaaataatatttaaaaacattaaaaatcattttaaaaaatttatttatagaacaattaaataaatatttcagctaataaaaaacaaaagcttacctagccttagaagacaacttgtccaacaattagatgatacccattgcccttacgttttctttaacatcaattattgtttttgtcaacaagctatcttttagttttattttattggtaaaaaatatgtcgccttcaagttgcatcatttaacacatctcgtcattagaaaaataaaactcttccctaaacgattagtagaaaaaatcattcgataataaataagaaagaaaaattagaaaaaaataacttcattttaaaaaaatcattaaggctatattttttaaatgactaattttatatagactgtaactaaaagtatacaatttattatgctatgtatcttaaagaattacttataaaaatctacggaagaatatcttacaaagtgaaaaacaaatgagaaagaatttagtgggatgattatgattttatttgaaaattgaaaaaataattattaaagactttagtggagtaagaaagctttcctattagtcttttcttatccataaaaaaaaaaaaaaaaatctagcgtgacagcttttccatagattttaataatgtaaaatactggtagcagccgaccgttcaggtaatggacactgtggtcctaacttgcaacgggtgcgggcccaatttaataacgccgtggtaacggataaagccaagcgtgaagcggtgaaggtacatctctgactccgtcaagattacgaaaccgtcaactacgaaggactccccgaaatatcatctgtgtcataaacaccaagtcacaccatacatgggcacgcgtcacaatatgattggagaacggttccaccgcatatgctataaaatgcccccacacccctcgaccctaatcgcacttcaattgcaatcaaattagttcattctctttgcgcagttccctacctctcctttcaaggttcgtagatttcttccgtttttttttcttcttctttattgtttgttctacatcagcatgatgttgatttgattgtgttttctatcgtttcatcgattataaattttcataatcagaagattcagcttttattaatgcaagaacgtccttaattgatgattttataaccgtaaattaggtctaattagagtttttttcataaagattttcagatccgtttacaacaagccttaattgttgattctgtagtcgtagattaaggtttttttcatgaactacttcagatccgttaaacaacagccttatttgttgatacttcagtcgtttttcaagaaattgttcagatccgttgataaaagccttattcgttgattctgtatggtatttcaagagatattgctcaggtcctttagcaactaccttatttgttgattctgtggccatagattaggattttttttcacgaaattgcttcttgaaattacgtgatggattttgattctgatttatcttgtgattgttgactctacagccatggcccacagcaagcacggcctgaaggaggagatgaccatgaagtaccacatggagggctgcgtgaacggccacaagttcgtgatcaccggcgagggcatcggctaccccttcaagggcaagcagaccatcaacctgtgcgtgatcgagggcggccccctgcccttcagcgaggacatcctgagcgccggcttcaagtacggcgaccggatcttcaccgagtacccccaggacatcgtggactacttcaagaacagctgccccgccggctacacctggggccggagcttcctgttcgaggacggcgccgtgtgcatctgtaacgtggacatcaccgtgagcgtgaaggagaactgcatctaccacaagagcatcttcaacggcgtgaacttccccgccgacggccccgtgatgaagaagatgaccaccaactgggaggccagctgcgagaagatcatgcccgtgcctaagcagggcatcctgaagggcgacgtgagcatgtacctgctgctgaaggacggcggccggtaccggtgccagttcgacaccgtgtacaaggccaagagcgtgcccagcaagatgcccgagtggcacttcatccagcacaagctgctgcgggaggaccggagcgacgccaagaaccagaagtggcagctgaccgagcacgccatcgccttccccagcgccctggcctgagagctcgaatttccccgatcgttcaaacatttggcaataaagtttcttaagattgaatcctgttgccggtcttgcgatgattatcatataatttctgttgaattacgttaagcatgtaataattaacatgtaatgcatgacgttatttatgagatgggtttttatgattagagtcccgcaattatacatttaatacgcgatagaaaacaaaatatagcgcgcaaactaggataaattatcgcgcgcggtgtcatctatgttactagatcgggaattctagtggccggcccagctgatatctagacccagctttcttgtacaaagtggccgttaacggatcggccagaatggcccggaccgggttaccgaattcgagctcggtaccctgggatccgatatcgatgggccctggccgaagcttggtcacccggtccgggcctagaaggccagcttcggccgccccgggcaactttattatacaaagttgatggtacggatccgtcgacggcgcgccgcggacctgaattccagcacactggcggccgttagtctaaaaacggcccctaactaacgcttagttgcccgctagattagtcccccgttagtgcctagttagacacacgacgaactaggggctactagtaacggccgccagtgtgctcggtacggccagaatggccatctggattcagcagggggtgattgcggttacatcatgtacggaaaaataattctaatccttgatttaaatttgaacttgactatttatttattctttatttcattttgtaaatcattttatgtatctcctggcaagcaattttatccaccttgcaccaacaccttcgggttccataatcaaaccaccttaacttcacaccatgctgtaactcacaccgcccagcatctccaatgtgaaagaagctaaaatttaataaacaatcatacgaagcagtgacaaaataccagatggtattaatgcttcgataaaattaattggaaagtataaaatggtagaaaataataaattataattaatttaagtaagataaaaaataattaaaaactaaaatgttaaaattttaaaaaaattattttaaataatatttaaaaacattaaaaatcattttaaaaaatttatttatagaacaattaaataaatatttcagctaataaaaaacaaaagcttacctagccttagaagacaacttgtccaacaattagatgatacccattgcccttacgttttctttaacatcaattattgtttttgtcaacaagctatcttttagttttattttattggtaaaaaatatgtcgccttcaagttgcatcatttaacacatctcgtcattagaaaaataaaactcttccctaaacgattagtagaaaaaatcattcgataataaataagaaagaaaaattagaaaaaaataacttcattttaaaaaaatcattaaggctatattttttaaatgactaattttatatagactgtaactaaaagtatacaatttattatgctatgtatcttaaagaattacttataaaaatctacggaagaatatcttacaaagtgaaaaacaaatgagaaagaatttagtgggatgattatgattttatttgaaaattgaaaaaataattattaaagactttagtggagtaagaaagctttcctattagtcttttcttatccataaaaaaaaaaaaaaaaatctagcgtgacagcttttccatagattttaataatgtaaaatactggtagcagccgaccgttcaggtaatggacactgtggtcctaacttgcaacgggtgcgggcccaatttaataacgccgtggtaacggataaagccaagcgtgaagcggtgaaggtacatctctgactccgtcaagattacgaaaccgtcaactacgaaggactccccgaaatatcatctgtgtcataaacaccaagtcacaccatacatgggcacgcgtcacaatatgattggagaacggttccaccgcatatgctataaaatgcccccacacccctcgaccctaatcgcacttcaattgcaatcaaattagttcattctctttgcgcagttccctacctctcctttcaaggttcgtagatttcttccgtttttttttcttcttctttattgtttgttctacatcagcatgatgttgatttgattgtgttttctatcgtttcatcgattataaattttcataatcagaagattcagcttttattaatgcaagaacgtccttaattgatgattttataaccgtaaattaggtctaattagagtttttttcataaagattttcagatccgtttacaacaagccttaattgttgattctgtagtcgtagattaaggtttttttcatgaactacttcagatccgttaaacaacagccttatttgttgatacttcagtcgtttttcaagaaattgttcagatccgttgataaaagccttattcgttgattctgtatggtatttcaagagatattgctcaggtcctttagcaactaccttatttgttgattctgtggccatagattaggattttttttcacgaaattgcttcttgaaattacgtgatggattttgattctgatttatcttgtgattgttgactctacagccatggctgcaactactcttacatctgctttacctggtgctttcagttcatcccagagaccaagtgctcctttcaacttacaaagatcacctagagtgcttagaaggttcaacagaaagacaggacgtcaacctcgtggacttgttcgtgctgcaaaggctcaagcggcgcaaaacctgccagagaaattcgatgaaacaagactctgggaggccctcaggggatttggggttagtccaagtagggttacttacgctcccgtcggattcggagattaccactggaccgtcacagatgaagacgggagaccttggttcgcaactgtcagtgacctcgaacacaaagagcattgcgggcagggagcacaagcagcccttaaaggactcagacaagctatggacactgccctcgcacttagagatagggacggactcagattcgtggttgctccagtggcagcaacagatgggggtggccctgtccttccccttgacgctaggtatgcactcacagtcttccctcacgtcccaggaagaacaggagagttcggacaaagactcacagaggcagagagggacagactgcttgctcttctggcagaactccacggaagaacacctcctgaaacaaccccaccagccgatatggaaccaccaggacttcctggtgttagagcagcactcgccgaaagtgaaggaccttggagtggaggaccatttgcagaacccgctagacttcttctcagagaacacgaggccacactgcacgcaagactcgctgaattcgaagccctcgtcgcaagagttaagggtcgtggagcacctcttgtcgttacccacggagaaccacacccaggcaacttgatcctcggagaggaaggctatctcctcgtggactgggatacagttggactggctccagctgaaagggatttgagtctcatctcagacgacccagctgacctcgcaagatacgcagagcttacaggaagaactccagacccagacgcactcgcactctatagactgcgttggagtctccttgatgtggctgagttcgtcgagtggttcagggctgaacaccaaagaacccaagacaccgagagtgcatggaaggggttcactgacacacttgggcaattggctgctggtggatcagctgcatagcaaacttatctctgttatgaatcagaagaagttcatgtctcgtttcatttaaaactttggtggtttgtgttttggggccttgtaaagcccctgatgaataattgttcaactatgtttccgttcctgtgttatacctttctttctaatgagtaatgacatcaaacttcttctgtattgaaattatgtccttgtgagtctctttatcatcgtttcgtctttacattatatgtgctacttttgtctaatgagcctgaaaagtggctccaatggtacgcactggaagatttgttggcttctggtagatatagcgacagtgttgagcttgtaatatcatgtctcttattgctaaattagttcctttcttaacagaaaccttcaaagtttttgtttttgttttcatttacctaatgtacacatacgctggccatgactaacaacatgtccaggcttagagcatatttttttctagcttaaattgttaacttgtcattcagtaaaatccgagaattgtgaagctctaattgaagctaattcgttttataaagtcagttaaaaagtatactaaattatccaacttttcttcaaaatctcaaaattctatgacaaaacgatagtctttgtttatgtcagtaccacaaagaggtggaaaaaaacaccaaaaaaacaataagcaaactatacactgagaagaaaaataaaagagagctcaatagatgttttatactaacggtagattagatcaaagatccaagctttactctacatagagcagaacccagaatcccttcatatctcttttattctagcaccgataatctactgaaaagaagacacttagagctctgtctctttgtcaaagaagtcccagccgtcatccagaagctccttacgttcattaacagaggccgcaattggatcgggtttacttattttgtgggtatctatacttttattagatttttaatcaggctcctgatttctttttatttcgattgaattcctgaacttgtattattcagtagatcgaataaattataaaaagataaaatcataaaataatattttatcctatcaatcatattaaagcaatgaatatgtaaaattaatcttatctttattttaaaaaatcatataggtttagtatttttttaaaaataaagataggattagttttactattcactgcttattacttttaaaaaaatcataaaggtttagtatttttttaaaataaatataggaatagttttactattcactgctttaatagaaaaatagtttaaaatttaagatagttttaatcccagcatttgccacgtttgaacgtgagccgaaacgatgtcgttacattatcttaacctagctgaaacgatgtcgtcataatatcgccaaatgccaactggactacgtcgaacccacaaatcccacaaagcgcgtgaaatcaaatcgctcaaaccacaaaaaagaacaacgcgtttgttacacgctcaatcccacgcgagtagagcacagtaaccttcaaataagcgaatggggcataatcagaaatccgaaataaacctaggggcattatcggaaatgaaaagtagctcactcaatataaaaatctaggaaccctagttttcgttatcactctgtgctccctcgctctatttctcagtctctgtgtttgcggctgaggattccgaacgagtgaccttcttcgtttctcgcaaaggtaacagcctctgctcttgtctcttcgattcgatctatgcctgtctcttatttacgatgatgtttcttcggttatgtttttttatttatgctttatgctgttgatgttcggttgtttgtttcgctttgtttttgtggttcagttttttaggattcttttggtttttgaatcgattaatcggaagagattttcgagttatttggtgtgttggaggtgaatcttttttttgaggtcatagatctgttgtatttgtgttataaacatgcgactttgtatgattttttacgaggttatgatgttctggttgttttattatgaatctgttgagacagaaccatgatttttgttgatgttcgtttacactattaaaggtttgttttaacaggattaaaagttttttaagcatgttgaaggagtcttgtagatatgtaaccgtcgatagtttttttgtgggtttgttcacatgttatcaagcttaatcttttactatgtatgcgaccatatctggatccagcaaaggcgattttttaattccttgtgaaacttttgtaatatgaagttgaaattttgttattggtaaactataaatgtgtgaagttggagtatacctttaccttcttatttggctttgtgatagtttaatttatatgtattttgagttctgacttgtatttctttgaattgattctagtttaagtaatcatggcctcctccgagaacgtcatcaccgagttcatgcgcttcaaggtgcgcatggagggcaccgtgaacggccacgagttcgagatcgagggcgagggcgagggccgcccctacgagggccacaacaccgtgaagctgaaggtgacgaagggcggccccctgcccttcgcctgggacatcctgtccccccagttccagtacggctccaaggtgtacgtgaagcaccccgccgacatccccgactacaagaagctgtccttccccgagggcttcaagtgggagcgcgtgatgaacttcgaggacggcggcgtggcgaccgtgacccaggactcctccctgcaggacggctgcttcatctacaaggtgaagttcatcggcgtgaacttcccctccgacggccccgtgatgcagaagaagaccatgggctgggaggcctccaccgagcgcctgtacccccgcgacggcgtgctgaagggcgagacccacaaggccctgaagctgaaggacggcggccactacctggtggagttcaagtccatctacatggccaagaagcccgtgcagctgcccggctactactacgtggacgccaagctggacatcacctcccacaacgaggactacaccatcgtggagcagtacgagcgcaccgagggccgccaccacctgttcctgtagttttgtgatctgatgataagtggttggttcgtgtctcatgcacttgggaggtgatctatttcacctggtgtagtttgtgtttccgtcagttggaaaaacttatccctatcgatttcgttttcattttctgcttttcttttatgtaccttcgtttgggcttgtaacgggcctttgtatttcaactctcaataataatccaagtgcatgttaaacaatttgtcatctgtttcggctttgatatactactggtgaagatgggccgtactactgcatcacaacgaaaaataataataagatgaaaaacttgaagtggaaaaaaaaaaaaacttgaatgttcactactactcattgaccataatgtttaacatacatagctcaatagtatttttgtgaatatggcaacacaaacagtccaaaacaattgtctcttactataccaaaccaagggcgccgcttgtttgccactctttgtgtgcaatagtgtgattaccacatctccacattcaatatattccctgaattatctgacgattttgatggctcactgttttcccaagtcttgaattgtcttctgtgcgccagtcaaatgcatatgtgttgagtttatcttttaaatatcaagcttttgtttttaacttttgtttgtaaccaaaaactcacagtaggagtttgatcacataattttatgtttgcctttgcaatttctagtgagtctttgattaaaagcttgaaaagaaaatgcagccaagcttaccaagtaagttatgtgtattaaccagaggaagagagaatcttgcaaaatttcaacaaacacaaaaagaagtattactacgattggtggagaaagaaaacgattccaaatcttgaactgttgttgtaaaagcatagcagaaagtgggagacaaccgaaatagaaatgactataacttaatttaatgttatcattataatttcttctagcaaatatttagaaagtaaatatcacatcaacctttaatgtaattaagctttctctttttgattcatgtgagatgaaaagaaaaaaaagaagagaaaagtgtagaaaacacatcatttctaagctgaagctgaggtacaaattaattaataagtgactagggtcacgtgaccctagtcacttatgattccgatgacttcgtaggttcctagctcaagccgctcgtgtccaagcgtcacttacgattagctaatgattacggcatctaggaccgactagttcttatgtgcttctagtctccaaatgtggttgatagttattttgctctaagatcaacagtaatgaagtataaatcatcgttgtggtgtgctactcggttaattgagcattaacacacacaaacatgacgaggatggtataatctccaaaaatgtgtactttgttaggtgggaccctatagccttgattaatgtgctatgttaggcatgcctggaaacgtgtgacgcatatgttttgtgaacctgttgatattatatgtgcttttatattaccatattttattaaaatactaatatttattactagtaagatataacattctatctagcttaaaaactaaccataaatattccataataactagatttaccaaactaatatactaaatatacataataaatacaaaattaacaagacaataatcaatatttatgagcttaatatatttagacattatggttggtcgacgataatcatgctaacttttcgtaattgcttgattgaaatatgcttagaataatgcctctttgttctacatggcaaatagggaccattatggtgtaacaccctgggaaccacaaacaccccgaaatgctactaaactacacaactaaccttcatatataaaatttcgacagcatctcctttgaaaatttgcatagacgtggaagcaacagagtataaacagatctagctagctaagtttaaacggccggccaaacgtgcaagcgctactagacaattcagtacattaaaaacgtccgcaatgtgttattaagttgtctaagcgtcaatttatttacaattgaatatatcctgcca

SEQ ID NO: 174 - DNA, 16534 bp, Artificial Sequence
  RV027342 T-DNA
caaacaaacatacacagcgatttattcacacgaacccgaattacaacggtatatatcctgtcagccaacaccaaaacatcaaaaaaatcgggatcaggatcaggatctgcggccgcatcctgcaggtttaaacggccggccttcactagctagctgctaagctcaaacgagcaggaagcaacgagagggtggcgcgcgaccgacgtgcgtacgtagcatgagcctgagtggagacgttggacgtgtatgtatatacctctctgcgtgttaactatgtacgtaagcggcaggcagtgcaataagtgtggctctgtagtatgtacgtgcgggtacgatgctgtaagctactgaggcaagtccataaataaataatgacacgtgcgtgttctataatctcttcgcttcttcatttgtccccttgcggagtttggcatccattgatgccgttacgctgagaacagacacagcagacgaaccaaaagtgagttcttgtatgaaactatgacccttcatcgctaggctcaaacagcaccccgtacgaacacagcaaattagtcatctaactattagcccctacatgtttcagacgatacataaatatagcccatccttagcaattagctattggccctgcccatcccaagcaatgatctcgaagtatttttaatatatagtatttttaatatgtagcttttaaaattagaagataattttgagacaaaaatctccaagtatttttttgggtattttttactgcctccgtttttctttatttctcgtcacctagtttaattttgtgctaatcggctataaacgaaacagagagaaaagttactctaaaagcaactccaacagattagatataaatcttatatcctgcctagagctgttaaaaagatagacaactttagtggattagtgtatgcaacaaactctccaaatttaagtatcccaactacccaacgcatatcgttcccttttcattggcgcacgaactttcacctgctatagccgacgtacatgttcgttttttttgggcggcgcttactttcttccccgttcgttctcagcatcgcaactcaatttgttatggcggagaagcccttgtatcccaggtagtaatgcacagatatgcattattattattcataaaatcgagctagttaccctatgaggtgacatgaagcgctcacggttactatgacggttagcttcacgactgttggtggcagtagcgtacgacttagctatagttccggacttacctaactgactagagtcacacttagctgaccctagtcacttaggcgcgccaagcttggatctcctgcaggatctggccggccggatgggcggatctcgtacctcaactttgtatagaaaagttgggccagaatggcccggaccgggttaccaagcggccgctttattttatatgtttaattttatagaatctaactagcttattttgagattaaattgtttagttacttttataacagtataaatgtataatgaggacctaagaatgtagtcctgtaatgttcttgctattctacttaatctcatcaccaatcaaccatcaaaagaagctagtactaataaaacctgcaggtattcgaataataattaagctcaaacactatactaatttatggaggattatatattcaatgaattaggaacctcatgatggacattattgactgatataatgtgtatactaattgtgagtatttaaaaaccatacaaagcatttatatgtccacatatattggacacacatgcaatcaatgttcaatatgctccacacacagaaataaaaatactctttctgatcatatgatacatcatacatatactaaaaaaatctaaaatgaactataaccacaagcatatataataacaatgaaatggtaatgtttcttcatttttatttgttcaaattcttattcggttgttttttcttaccctacgagaatccgtgaggtcaaagggaaacagtgattttttttttgtattttgttttttaaattgatgaactgtaaaactctctctctagaaaaatatataagtagtagtatgaattttctctcactaaaagcattaatggacctttcgataatcataaatgcaatgcaccctctctatgcatttcgcaataactccttttccttctgccacatcctcttcctcacctctttctcttcttccctttctcctaagttcctcctccaccaaattctccatttatttcgttaactatcctccatttgttttcttctgaagagtgatatattctacctttctctggttaaagaaactccctgaatccaccggttatgtcttgaccggctataagcctataaactgatgccctaagacacctttttaggtttctcaataattctccgcatctatcttttcttctccacaagtaagagaaccagaaaaccagagaagaagccgagctagctagggtttcattgtgtgcacaaaagtaagatctctctctctaaccaatacttgtgtaatttgtctttgtttctttgagcaaatattgcatgtttgttcatattagccggatccgttttatattttttcatgatctacattttatctttattttgtttgtaaattaatgagttttttttttttttttctgtttttgtcacgatctaaaaaacaagcgttacaaagaagaagaaaaacctttttggagttagaagtgtaaaaggggtttcagtttgacgaattttccttagtagttgtgtaaaaaaaggccattgacttaatgtcaactctatatatctacacatttttttattaattagtttttgtttttttcccacttcatttacctttagtcaatgaatttttactgaaaacgttttttcaaggtcaatttcactgagttaaaaaaaaccatggaaactcaacaacaacaagcagatattcaagattttgggaacaaaaacagtaacacctatgcatgcaggcaaagcagtactaggtggacacccacaagtgatcagatcagaatactgaaagagctctactacaacaatggaatcagatcaccaactgctgatcagattcagagaatcgctgctcaactcagacagtacggcaagattgaaggcaagaacgtgttttattggtttcagaaccataaagctcgtgaacgccagaagaaacggttcactcctactgctcctccaccaccgtctcacttctccgatcatattaaccaccatcttcccaacgctgcccccatgcagattccgtctcaccaccaccactaccaccatcaagaaccaccacatgtctatgctcaccctcacaaactctacaccactcatcacattggggttggttcttcttcacaaggagtgatgggtgtagggtgtggctatggatctgttgctatggagaagagtttcaggaagtgttcaatatcaccaccgggagagagtaaggccacaggaggaattggccggaatatcggttcaagatcacggataagtgtcgattcgtgttccttcttcgacacaattaagccaaagacatatgagatgtttgagaatcatgatcaagatgaagaacaaggagagccttcaactgagatcgaaacacttccattattcccgattcacgacggcaaccatcatgatttcttcggcatgaggacggcaaatctgcaattggagcaaggcactggaggttactacactggaggaagctggtatcggtctgatgagagggcgtctcttgagctcagtctcaactcatatggttattataactaattcgaactggccaggtacctgacatcttatagtctgcaacctctcgtgtctgaattcctatctttatcaagtgttattgcttccacgactataggacagctttcgtcgaaaggttttgctcatgtgatctcgaaggattcatctagtctgatttttcgtgacttgtatcggttttattggattcatccaacatatatcaataaaaaatgagttgtgtttcctttcttcctagttcagttaaaattatttccctcctgcgcttgtgctgtaattgtctgtgtacctgttgtttgtgactgtgttagttcccttggatatgatttcgtatttgatatgtacatggagatagcttagcttcattattggagtatgaagttagtatgacatagtcactctcctggaaaattgacactgcaaaccatatttttattctgaaccacaaatcctagtcagtccgctggcatatgccgtccgtttgctgaatccagaacgtgggtttggagatgtacggctgagatgcctctatgcgaaggggatttcgtggtgaaacgagatgggagtagagcaacgcccgtggaagatgcttcaaacttccacacttttgagcaacgatcggcagtagtaaggtagacgatttcaagatcaaagcatatgaagataaacaacatcaacaacaaaatttgttggggttctatagagagaaacagagctacatacatacactgttttgtatctaccatctgagatgatgaaaagatgaaaaactaaagaatgccccggcgccaacgccaggacacgccgcgcgcgcgtcacccgagccatctcttgacccagccggcgctgtatatttacacacgttgcagcatcgatcaccacctgttcgatcgcgtcgccgtcaccaagcttggcgcgccggtcacccggtccgggcctagaaggccacccggggctcggcgttaggcttttagtccgctaggtggctagaccgaggttaggacgctagttcactaggggcctagtggtgttttaaggatgggcaagtttgtacaaaaaagcaggctggcgccggaaccaattcagtcgagtgcggccgccagtgtgatggatatctcgacccgggtgattgcggttacatcatgtacggaaaaataattctaatccttgatttaaatttgaacttgactatttatttattctttatttcattttgtaaatcattttatgtatctcctggcaagcaattttatccaccttgcaccaacaccttcgggttccataatcaaaccaccttaacttcacaccatgctgtaactcacaccgcccagcatctccaatgtgaaagaagctaaaatttaataaacaatcatacgaagcagtgacaaaataccagatggtattaatgcttcgataaaattaattggaaagtataaaatggtagaaaataataaattataattaatttaagtaagataaaaaataattaaaaactaaaatgttaaaattttaaaaaaattattttaaataatatttaaaaacattaaaaatcattttaaaaaatttatttatagaacaattaaataaatatttcagctaataaaaaacaaaagcttacctagccttagaagacaacttgtccaacaattagatgatacccattgcccttacgttttctttaacatcaattattgtttttgtcaacaagctatcttttagttttattttattggtaaaaaatatgtcgccttcaagttgcatcatttaacacatctcgtcattagaaaaataaaactcttccctaaacgattagtagaaaaaatcattcgataataaataagaaagaaaaattagaaaaaaataacttcattttaaaaaaatcattaaggctatattttttaaatgactaattttatatagactgtaactaaaagtatacaatttattatgctatgtatcttaaagaattacttataaaaatctacggaagaatatcttacaaagtgaaaaacaaatgagaaagaatttagtgggatgattatgattttatttgaaaattgaaaaaataattattaaagactttagtggagtaagaaagctttcctattagtcttttcttatccataaaaaaaaaaaaaaaaatctagcgtgacagcttttccatagattttaataatgtaaaatactggtagcagccgaccgttcaggtaatggacactgtggtcctaacttgcaacgggtgcgggcccaatttaataacgccgtggtaacggataaagccaagcgtgaagcggtgaaggtacatctctgactccgtcaagattacgaaaccgtcaactacgaaggactccccgaaatatcatctgtgtcataaacaccaagtcacaccatacatgggcacgcgtcacaatatgattggagaacggttccaccgcatatgctataaaatgcccccacacccctcgaccctaatcgcacttcaattgcaatcaaattagttcattctctttgcgcagttccctacctctcctttcaaggttcgtagatttcttccgtttttttttcttcttctttattgtttgttctacatcagcatgatgttgatttgattgtgttttctatcgtttcatcgattataaattttcataatcagaagattcagcttttattaatgcaagaacgtccttaattgatgattttataaccgtaaattaggtctaattagagtttttttcataaagattttcagatccgtttacaacaagccttaattgttgattctgtagtcgtagattaaggtttttttcatgaactacttcagatccgttaaacaacagccttatttgttgatacttcagtcgtttttcaagaaattgttcagatccgttgataaaagccttattcgttgattctgtatggtatttcaagagatattgctcaggtcctttagcaactaccttatttgttgattctgtggccatagattaggattttttttcacgaaattgcttcttgaaattacgtgatggattttgattctgatttatcttgtgattgttgactctacagccatggcccacagcaagcacggcctgaaggaggagatgaccatgaagtaccacatggagggctgcgtgaacggccacaagttcgtgatcaccggcgagggcatcggctaccccttcaagggcaagcagaccatcaacctgtgcgtgatcgagggcggccccctgcccttcagcgaggacatcctgagcgccggcttcaagtacggcgaccggatcttcaccgagtacccccaggacatcgtggactacttcaagaacagctgccccgccggctacacctggggccggagcttcctgttcgaggacggcgccgtgtgcatctgtaacgtggacatcaccgtgagcgtgaaggagaactgcatctaccacaagagcatcttcaacggcgtgaacttccccgccgacggccccgtgatgaagaagatgaccaccaactgggaggccagctgcgagaagatcatgcccgtgcctaagcagggcatcctgaagggcgacgtgagcatgtacctgctgctgaaggacggcggccggtaccggtgccagttcgacaccgtgtacaaggccaagagcgtgcccagcaagatgcccgagtggcacttcatccagcacaagctgctgcgggaggaccggagcgacgccaagaaccagaagtggcagctgaccgagcacgccatcgccttccccagcgccctggcctgagagctcgaatttccccgatcgttcaaacatttggcaataaagtttcttaagattgaatcctgttgccggtcttgcgatgattatcatataatttctgttgaattacgttaagcatgtaataattaacatgtaatgcatgacgttatttatgagatgggtttttatgattagagtcccgcaattatacatttaatacgcgatagaaaacaaaatatagcgcgcaaactaggataaattatcgcgcgcggtgtcatctatgttactagatcgggaattctagtggccggcccagctgatatctagacccagctttcttgtacaaagtggccgttaacggatcggccagaatggcccggaccgggttaccgaattcgagctcggtaccctgggatccgatatcgatgggccctggccgaagcttggtcacccggtccgggcctagaaggccagcttcggccgccccgggcaactttattatacaaagttgatggtacggatccgtcgacggcgcgccgcggacctgaattccagcacactggcggccgttagtctaaaaacggcccctaactaacgcttagttgcccgctagattagtcccccgttagtgcctagttagacacacgacgaactaggggctactagtaacggccgccagtgtgctcggtacggccagaatggccatctggattcagcagggggtgattgcggttacatcatgtacggaaaaataattctaatccttgatttaaatttgaacttgactatttatttattctttatttcattttgtaaatcattttatgtatctcctggcaagcaattttatccaccttgcaccaacaccttcgggttccataatcaaaccaccttaacttcacaccatgctgtaactcacaccgcccagcatctccaatgtgaaagaagctaaaatttaataaacaatcatacgaagcagtgacaaaataccagatggtattaatgcttcgataaaattaattggaaagtataaaatggtagaaaataataaattataattaatttaagtaagataaaaaataattaaaaactaaaatgttaaaattttaaaaaaattattttaaataatatttaaaaacattaaaaatcattttaaaaaatttatttatagaacaattaaataaatatttcagctaataaaaaacaaaagcttacctagccttagaagacaacttgtccaacaattagatgatacccattgcccttacgttttctttaacatcaattattgtttttgtcaacaagctatcttttagttttattttattggtaaaaaatatgtcgccttcaagttgcatcatttaacacatctcgtcattagaaaaataaaactcttccctaaacgattagtagaaaaaatcattcgataataaataagaaagaaaaattagaaaaaaataacttcattttaaaaaaatcattaaggctatattttttaaatgactaattttatatagactgtaactaaaagtatacaatttattatgctatgtatcttaaagaattacttataaaaatctacggaagaatatcttacaaagtgaaaaacaaatgagaaagaatttagtgggatgattatgattttatttgaaaattgaaaaaataattattaaagactttagtggagtaagaaagctttcctattagtcttttcttatccataaaaaaaaaaaaaaaaatctagcgtgacagcttttccatagattttaataatgtaaaatactggtagcagccgaccgttcaggtaatggacactgtggtcctaacttgcaacgggtgcgggcccaatttaataacgccgtggtaacggataaagccaagcgtgaagcggtgaaggtacatctctgactccgtcaagattacgaaaccgtcaactacgaaggactccccgaaatatcatctgtgtcataaacaccaagtcacaccatacatgggcacgcgtcacaatatgattggagaacggttccaccgcatatgctataaaatgcccccacacccctcgaccctaatcgcacttcaattgcaatcaaattagttcattctctttgcgcagttccctacctctcctttcaaggttcgtagatttcttccgtttttttttcttcttctttattgtttgttctacatcagcatgatgttgatttgattgtgttttctatcgtttcatcgattataaattttcataatcagaagattcagcttttattaatgcaagaacgtccttaattgatgattttataaccgtaaattaggtctaattagagtttttttcataaagattttcagatccgtttacaacaagccttaattgttgattctgtagtcgtagattaaggtttttttcatgaactacttcagatccgttaaacaacagccttatttgttgatacttcagtcgtttttcaagaaattgttcagatccgttgataaaagccttattcgttgattctgtatggtatttcaagagatattgctcaggtcctttagcaactaccttatttgttgattctgtggccatagattaggattttttttcacgaaattgcttcttgaaattacgtgatggattttgattctgatttatcttgtgattgttgactctacagccatggctgcaactactcttacatctgctttacctggtgctttcagttcatcccagagaccaagtgctcctttcaacttacaaagatcacctagagtgcttagaaggttcaacagaaagacaggacgtcaacctcgtggacttgttcgtgctgcaaaggctcaagcggcgcaaaacctgccagagaaattcgatgaaacaagactctgggaggccctcaggggatttggggttagtccaagtagggttacttacgctcccgtcggattcggagattaccactggaccgtcacagatgaagacgggagaccttggttcgcaactgtcagtgacctcgaacacaaagagcattgcgggcagggagcacaagcagcccttaaaggactcagacaagctatggacactgccctcgcacttagagatagggacggactcagattcgtggttgctccagtggcagcaacagatgggggtggccctgtccttccccttgacgctaggtatgcactcacagtcttccctcacgtcccaggaagaacaggagagttcggacaaagactcacagaggcagagagggacagactgcttgctcttctggcagaactccacggaagaacacctcctgaaacaaccccaccagccgatatggaaccaccaggacttcctggtgttagagcagcactcgccgaaagtgaaggaccttggagtggaggaccatttgcagaacccgctagacttcttctcagagaacacgaggccacactgcacgcaagactcgctgaattcgaagccctcgtcgcaagagttaagggtcgtggagcacctcttgtcgttacccacggagaaccacacccaggcaacttgatcctcggagaggaaggctatctcctcgtggactgggatacagttggactggctccagctgaaagggatttgagtctcatctcagacgacccagctgacctcgcaagatacgcagagcttacaggaagaactccagacccagacgcactcgcactctatagactgcgttggagtctccttgatgtggctgagttcgtcgagtggttcagggctgaacaccaaagaacccaagacaccgagagtgcatggaaggggttcactgacacacttgggcaattggctgctggtggatcagctgcatagcaaacttatctctgttatgaatcagaagaagttcatgtctcgtttcatttaaaactttggtggtttgtgttttggggccttgtaaagcccctgatgaataattgttcaactatgtttccgttcctgtgttatacctttctttctaatgagtaatgacatcaaacttcttctgtattgaaattatgtccttgtgagtctctttatcatcgtttcgtctttacattatatgtgctacttttgtctaatgagcctgaaaagtggctccaatggtacgcactggaagatttgttggcttctggtagatatagcgacagtgttgagcttgtaatatcatgtctcttattgctaaattagttcctttcttaacagaaaccttcaaagtttttgtttttgttttcatttacctaatgtacacatacgctggccatgactaacaacatgtccaggcttagagcatatttttttctagcttaaattgttaacttgtcattcagtaaaatccgagaattgtgaagctctaattgaagctaattcgttttataaagtcagttaaaaagtatactaaattatccaacttttcttcaaaatctcaaaattctatgacaaaacgatagtctttgtttatgtcagtaccacaaagaggtggaaaaaaacaccaaaaaaacaataagcaaactatacactgagaagaaaaataaaagagagctcaatagatgttttatactaacggtagattagatcaaagatccaagctttactctacatagagcagaacccagaatcccttcatatctcttttattctagcaccgataatctactgaaaagaagacacttagagctctgtctctttgtcaaagaagtcccagccgtcatccagaagctccttacgttcattaacagaggccgcaattggatcgggtttacttattttgtgggtatctatacttttattagatttttaatcaggctcctgatttctttttatttcgattgaattcctgaacttgtattattcagtagatcgaataaattataaaaagataaaatcataaaataatattttatcctatcaatcatattaaagcaatgaatatgtaaaattaatcttatctttattttaaaaaatcatataggtttagtatttttttaaaaataaagataggattagttttactattcactgcttattacttttaaaaaaatcataaaggtttagtatttttttaaaataaatataggaatagttttactattcactgctttaatagaaaaatagtttaaaatttaagatagttttaatcccagcatttgccacgtttgaacgtgagccgaaacgatgtcgttacattatcttaacctagctgaaacgatgtcgtcataatatcgccaaatgccaactggactacgtcgaacccacaaatcccacaaagcgcgtgaaatcaaatcgctcaaaccacaaaaaagaacaacgcgtttgttacacgctcaatcccacgcgagtagagcacagtaaccttcaaataagcgaatggggcataatcagaaatccgaaataaacctaggggcattatcggaaatgaaaagtagctcactcaatataaaaatctaggaaccctagttttcgttatcactctgtgctccctcgctctatttctcagtctctgtgtttgcggctgaggattccgaacgagtgaccttcttcgtttctcgcaaaggtaacagcctctgctcttgtctcttcgattcgatctatgcctgtctcttatttacgatgatgtttcttcggttatgtttttttatttatgctttatgctgttgatgttcggttgtttgtttcgctttgtttttgtggttcagttttttaggattcttttggtttttgaatcgattaatcggaagagattttcgagttatttggtgtgttggaggtgaatcttttttttgaggtcatagatctgttgtatttgtgttataaacatgcgactttgtatgattttttacgaggttatgatgttctggttgttttattatgaatctgttgagacagaaccatgatttttgttgatgttcgtttacactattaaaggtttgttttaacaggattaaaagttttttaagcatgttgaaggagtcttgtagatatgtaaccgtcgatagtttttttgtgggtttgttcacatgttatcaagcttaatcttttactatgtatgcgaccatatctggatccagcaaaggcgattttttaattccttgtgaaacttttgtaatatgaagttgaaattttgttattggtaaactataaatgtgtgaagttggagtatacctttaccttcttatttggctttgtgatagtttaatttatatgtattttgagttctgacttgtatttctttgaattgattctagtttaagtaatcatggcctcctccgagaacgtcatcaccgagttcatgcgcttcaaggtgcgcatggagggcaccgtgaacggccacgagttcgagatcgagggcgagggcgagggccgcccctacgagggccacaacaccgtgaagctgaaggtgacgaagggcggccccctgcccttcgcctgggacatcctgtccccccagttccagtacggctccaaggtgtacgtgaagcaccccgccgacatccccgactacaagaagctgtccttccccgagggcttcaagtgggagcgcgtgatgaacttcgaggacggcggcgtggcgaccgtgacccaggactcctccctgcaggacggctgcttcatctacaaggtgaagttcatcggcgtgaacttcccctccgacggccccgtgatgcagaagaagaccatgggctgggaggcctccaccgagcgcctgtacccccgcgacggcgtgctgaagggcgagacccacaaggccctgaagctgaaggacggcggccactacctggtggagttcaagtccatctacatggccaagaagcccgtgcagctgcccggctactactacgtggacgccaagctggacatcacctcccacaacgaggactacaccatcgtggagcagtacgagcgcaccgagggccgccaccacctgttcctgtagttttgtgatctgatgataagtggttggttcgtgtctcatgcacttgggaggtgatctatttcacctggtgtagtttgtgtttccgtcagttggaaaaacttatccctatcgatttcgttttcattttctgcttttcttttatgtaccttcgtttgggcttgtaacgggcctttgtatttcaactctcaataataatccaagtgcatgttaaacaatttgtcatctgtttcggctttgatatactactggtgaagatgggccgtactactgcatcacaacgaaaaataataataagatgaaaaacttgaagtggaaaaaaaaaaaaacttgaatgttcactactactcattgaccataatgtttaacatacatagctcaatagtatttttgtgaatatggcaacacaaacagtccaaaacaattgtctcttactataccaaaccaagggcgccgcttgtttgccactctttgtgtgcaatagtgtgattaccacatctccacattcaatatattccctgaattatctgacgattttgatggctcactgttttcccaagtcttgaattgtcttctgtgcgccagtcaaatgcatatgtgttgagtttatcttttaaatatcaagcttttgtttttaacttttgtttgtaaccaaaaactcacagtaggagtttgatcacataattttatgtttgcctttgcaatttctagtgagtctttgattaaaagcttgaaaagaaaatgcagccaagcttaccaagtaagttatgtgtattaaccagaggaagagagaatcttgcaaaatttcaacaaacacaaaaagaagtattactacgattggtggagaaagaaaacgattccaaatcttgaactgttgttgtaaaagcatagcagaaagtgggagacaaccgaaatagaaatgactataacttaatttaatgttatcattataatttcttctagcaaatatttagaaagtaaatatcacatcaacctttaatgtaattaagctttctctttttgattcatgtgagatgaaaagaaaaaaaagaagagaaaagtgtagaaaacacatcatttctaagctgaagctgaggtacaaattaattaataagtgactagggtcacgtgaccctagtcacttatgattccgatgacttcgtaggttcctagctcaagccgctcgtgtccaagcgtcacttacgattagctaatgattacggcatctaggaccgactagttcttatgtgcttctagtctccaaatgtggttgatagttattttgctctaagatcaacagtaatgaagtataaatcatcgttgtggtgtgctactcggttaattgagcattaacacacacaaacatgacgaggatggtataatctccaaaaatgtgtactttgttaggtgggaccctatagccttgattaatgtgctatgttaggcatgcctggaaacgtgtgacgcatatgttttgtgaacctgttgatattatatgtgcttttatattaccatattttattaaaatactaatatttattactagtaagatataacattctatctagcttaaaaactaaccataaatattccataataactagatttaccaaactaatatactaaatatacataataaatacaaaattaacaagacaataatcaatatttatgagcttaatatatttagacattatggttggtcgacgataatcatgctaacttttcgtaattgcttgattgaaatatgcttagaataatgcctctttgttctacatggcaaatagggaccattatggtgtaacaccctgggaaccacaaacaccccgaaatgctactaaactacacaactaaccttcatatataaaatttcgacagcatctcctttgaaaatttgcatagacgtggaagcaacagagtataaacagatctagctagctaagtttaaacggccggccaaacgtgcaagcgctactagacaattcagtacattaaaaacgtccgcaatgtgttattaagttgtctaagcgtcaatttatttacaattgaatatatcctgcca

SEQ ID NO: 175 - DNA, 16534 bp, Artificial Sequence
  RV027343 T-DNA
caaacaaacatacacagcgatttattcacacgaacccgaattacaacggtatatatcctgtcagccaacaccaaaacatcaaaaaaatcgggatcaggatcaggatctgcggccgcatcctgcaggtttaaacggccggccttcactagctagctgctaagctcaaacgagcaggaagcaacgagagggtggcgcgcgaccgacgtgcgtacgtagcatgagcctgagtggagacgttggacgtgtatgtatatacctctctgcgtgttaactatgtacgtaagcggcaggcagtgcaataagtgtggctctgtagtatgtacgtgcgggtacgatgctgtaagctactgaggcaagtccataaataaataatgacacgtgcgtgttctataatctcttcgcttcttcatttgtccccttgcggagtttggcatccattgatgccgttacgctgagaacagacacagcagacgaaccaaaagtgagttcttgtatgaaactatgacccttcatcgctaggctcaaacagcaccccgtacgaacacagcaaattagtcatctaactattagcccctacatgtttcagacgatacataaatatagcccatccttagcaattagctattggccctgcccatcccaagcaatgatctcgaagtatttttaatatatagtatttttaatatgtagcttttaaaattagaagataattttgagacaaaaatctccaagtatttttttgggtattttttactgcctccgtttttctttatttctcgtcacctagtttaattttgtgctaatcggctataaacgaaacagagagaaaagttactctaaaagcaactccaacagattagatataaatcttatatcctgcctagagctgttaaaaagatagacaactttagtggattagtgtatgcaacaaactctccaaatttaagtatcccaactacccaacgcatatcgttcccttttcattggcgcacgaactttcacctgctatagccgacgtacatgttcgttttttttgggcggcgcttactttcttccccgttcgttctcagcatcgcaactcaatttgttatggcggagaagcccttgtatcccaggtagtaatgcacagatatgcattattattattcataaaatcgagctagttaccctatgaggtgacatgaagcgctcacggttactatgacggttagcttcacgactgttggtggcagtagcgtacgacttagctatagttccggacttacctaactgactagagtcacacttagctgaccctagtcacttaggcgcgccaagcttggatctcctgcaggatctggccggccggatgggcggatctcgtacctcaactttgtatagaaaagttgggccagaatggcccggaccgggttaccaagcggccgctggcaacttcaatgaattctgaatttaaaacatttttttttatatatatagatgatttggcgattttcgaactggaatggtgaaaaagtggttgagtacactattagtttatttatttaaaaaatagagggaaattcaaatgaaaaaaaaagtttcatctacagaaaaaaaaacacgtcaaaattccaaaaaacttgaacgtcttgaacaacggtataaccgtataagaaagggaacttaaaacttaaacgtctacatgattgaaagggtaaaaatattcatattacaatggtataagaaaatggagaagccagaggagcaactccaaagaagaagatgcagcaagagagtgtacattattataattataagttggtatatatgtagttgctaaaaaaaaaaaagagtgtacaatattttctgaagaagcatcgagctggttaatatttaagacccaccaaaacctaccaacaatgttattctcatctctaagcaaaagtttgatctcatctttttttttaattttttttttgatgggtcctcttctacctctgcatctccacgtgctatacaagtggcctcgctgtatgtattatttaccactctcttattgttactaaaaacttgaatgtcacttgaatgtcacttgaatgcaaactatatatttaggtgaataccagatcaaatagcaataaataaaccaacaatttatgctaattaaaaacttgaaaaaacactttccattacctatgattttttaatccaatcttggggtttgatgcccataaaacgaagtcgaaaagagaaaagcgaccttaattgtaataaatgcagctattgacttctctatcaacttcaagtcttcaagtaactacaaatttaataatctccttagcttatcttagagaagcacaaaacaaaagggtctacgcttagtcttcctagattcttgatttgagtcttgatggccacttgctttttatgtctcaatcctaagagttgatacttacttagtattaatcaggtttcacattatctcagacctagcttgcatttttgatacaaacatgtcatgcaatacacataagcaacacgtaccgagtcattgattgaaaaacatgacctaaatagtaatacggactgagagagagtgatgaatcatttcatatgggagacagctttctcatacgcgtccatgcctttgcatgaaagattaaataattcaactctttcacttatcttattttaatttactttgcagaattccaagttttattgcaatcaccaggggtattaaatgggatagtgtaaatgcacctgcaacacatcaactaaccacacactcctccacctgtttgtatttacttcaaaaacttaattcaaaaatccctttgcttctttccttccctctatttataaaccctagtatccggtttttattctaccacacaataccatttgcaacaaacttctctctgaatctcagtgaattctcataaaccatggaaactcaacaacaacaagcagatattcaagattttgggaacaaaaacagtaacacctatgcatgcaggcaaagcagtactaggtggacacccacaagtgatcagatcagaatactgaaagagctctactacaacaatggaatcagatcaccaactgctgatcagattcagagaatcgctgctcaactcagacagtacggcaagattgaaggcaagaacgtgttttattggtttcagaaccataaagctcgtgaacgccagaagaaacggttcactcctactgctcctccaccaccgtctcacttctccgatcatattaaccaccatcttcccaacgctgcccccatgcagattccgtctcaccaccaccactaccaccatcaagaaccaccacatgtctatgctcaccctcacaaactctacaccactcatcacattggggttggttcttcttcacaaggagtgatgggtgtagggtgtggctatggatctgttgctatggagaagagtttcaggaagtgttcaatatcaccaccgggagagagtaaggccacaggaggaattggccggaatatcggttcaagatcacggataagtgtcgattcgtgttccttcttcgacacaattaagccaaagacatatgagatgtttgagaatcatgatcaagatgaagaacaaggagagccttcaactgagatcgaaacacttccattattcccgattcacgacggcaaccatcatgatttcttcggcatgaggacggcaaatctgcaattggagcaaggcactggaggttactacactggaggaagctggtatcggtctgatgagagggcgtctcttgagctcagtctcaactcatatggttattataactaattcgaactggccaggtacctgacatcttatagtctgcaacctctcgtgtctgaattcctatctttatcaagtgttattgcttccacgactataggacagctttcgtcgaaaggttttgctcatgtgatctcgaaggattcatctagtctgatttttcgtgacttgtatcggttttattggattcatccaacatatatcaataaaaaatgagttgtgtttcctttcttcctagttcagttaaaattatttccctcctgcgcttgtgctgtaattgtctgtgtacctgttgtttgtgactgtgttagttcccttggatatgatttcgtatttgatatgtacatggagatagcttagcttcattattggagtatgaagttagtatgacatagtcactctcctggaaaattgacactgcaaaccatatttttattctgaaccacaaatcctagtcagtccgctggcatatgccgtccgtttgctgaatccagaacgtgggtttggagatgtacggctgagatgcctctatgcgaaggggatttcgtggtgaaacgagatgggagtagagcaacgcccgtggaagatgcttcaaacttccacacttttgagcaacgatcggcagtagtaaggtagacgatttcaagatcaaagcatatgaagataaacaacatcaacaacaaaatttgttggggttctatagagagaaacagagctacatacatacactgttttgtatctaccatctgagatgatgaaaagatgaaaaactaaagaatgccccggcgccaacgccaggacacgccgcgcgcgcgtcacccgagccatctcttgacccagccggcgctgtatatttacacacgttgcagcatcgatcaccacctgttcgatcgcgtcgccgtcaccaagcttggcgcgccggtcacccggtccgggcctagaaggccacccggggctcggcgttaggcttttagtccgctaggtggctagaccgaggttaggacgctagttcactaggggcctagtggtgttttaaggatgggcaagtttgtacaaaaaagcaggctggcgccggaaccaattcagtcgagtgcggccgccagtgtgatggatatctcgacccgggtgattgcggttacatcatgtacggaaaaataattctaatccttgatttaaatttgaacttgactatttatttattctttatttcattttgtaaatcattttatgtatctcctggcaagcaattttatccaccttgcaccaacaccttcgggttccataatcaaaccaccttaacttcacaccatgctgtaactcacaccgcccagcatctccaatgtgaaagaagctaaaatttaataaacaatcatacgaagcagtgacaaaataccagatggtattaatgcttcgataaaattaattggaaagtataaaatggtagaaaataataaattataattaatttaagtaagataaaaaataattaaaaactaaaatgttaaaattttaaaaaaattattttaaataatatttaaaaacattaaaaatcattttaaaaaatttatttatagaacaattaaataaatatttcagctaataaaaaacaaaagcttacctagccttagaagacaacttgtccaacaattagatgatacccattgcccttacgttttctttaacatcaattattgtttttgtcaacaagctatcttttagttttattttattggtaaaaaatatgtcgccttcaagttgcatcatttaacacatctcgtcattagaaaaataaaactcttccctaaacgattagtagaaaaaatcattcgataataaataagaaagaaaaattagaaaaaaataacttcattttaaaaaaatcattaaggctatattttttaaatgactaattttatatagactgtaactaaaagtatacaatttattatgctatgtatcttaaagaattacttataaaaatctacggaagaatatcttacaaagtgaaaaacaaatgagaaagaatttagtgggatgattatgattttatttgaaaattgaaaaaataattattaaagactttagtggagtaagaaagctttcctattagtcttttcttatccataaaaaaaaaaaaaaaaatctagcgtgacagcttttccatagattttaataatgtaaaatactggtagcagccgaccgttcaggtaatggacactgtggtcctaacttgcaacgggtgcgggcccaatttaataacgccgtggtaacggataaagccaagcgtgaagcggtgaaggtacatctctgactccgtcaagattacgaaaccgtcaactacgaaggactccccgaaatatcatctgtgtcataaacaccaagtcacaccatacatgggcacgcgtcacaatatgattggagaacggttccaccgcatatgctataaaatgcccccacacccctcgaccctaatcgcacttcaattgcaatcaaattagttcattctctttgcgcagttccctacctctcctttcaaggttcgtagatttcttccgtttttttttcttcttctttattgtttgttctacatcagcatgatgttgatttgattgtgttttctatcgtttcatcgattataaattttcataatcagaagattcagcttttattaatgcaagaacgtccttaattgatgattttataaccgtaaattaggtctaattagagtttttttcataaagattttcagatccgtttacaacaagccttaattgttgattctgtagtcgtagattaaggtttttttcatgaactacttcagatccgttaaacaacagccttatttgttgatacttcagtcgtttttcaagaaattgttcagatccgttgataaaagccttattcgttgattctgtatggtatttcaagagatattgctcaggtcctttagcaactaccttatttgttgattctgtggccatagattaggattttttttcacgaaattgcttcttgaaattacgtgatggattttgattctgatttatcttgtgattgttgactctacagccatggcccacagcaagcacggcctgaaggaggagatgaccatgaagtaccacatggagggctgcgtgaacggccacaagttcgtgatcaccggcgagggcatcggctaccccttcaagggcaagcagaccatcaacctgtgcgtgatcgagggcggccccctgcccttcagcgaggacatcctgagcgccggcttcaagtacggcgaccggatcttcaccgagtacccccaggacatcgtggactacttcaagaacagctgccccgccggctacacctggggccggagcttcctgttcgaggacggcgccgtgtgcatctgtaacgtggacatcaccgtgagcgtgaaggagaactgcatctaccacaagagcatcttcaacggcgtgaacttccccgccgacggccccgtgatgaagaagatgaccaccaactgggaggccagctgcgagaagatcatgcccgtgcctaagcagggcatcctgaagggcgacgtgagcatgtacctgctgctgaaggacggcggccggtaccggtgccagttcgacaccgtgtacaaggccaagagcgtgcccagcaagatgcccgagtggcacttcatccagcacaagctgctgcgggaggaccggagcgacgccaagaaccagaagtggcagctgaccgagcacgccatcgccttccccagcgccctggcctgagagctcgaatttccccgatcgttcaaacatttggcaataaagtttcttaagattgaatcctgttgccggtcttgcgatgattatcatataatttctgttgaattacgttaagcatgtaataattaacatgtaatgcatgacgttatttatgagatgggtttttatgattagagtcccgcaattatacatttaatacgcgatagaaaacaaaatatagcgcgcaaactaggataaattatcgcgcgcggtgtcatctatgttactagatcgggaattctagtggccggcccagctgatatctagacccagctttcttgtacaaagtggccgttaacggatcggccagaatggcccggaccgggttaccgaattcgagctcggtaccctgggatccgatatcgatgggccctggccgaagcttggtcacccggtccgggcctagaaggccagcttcggccgccccgggcaactttattatacaaagttgatggtacggatccgtcgacggcgcgccgcggacctgaattccagcacactggcggccgttagtctaaaaacggcccctaactaacgcttagttgcccgctagattagtcccccgttagtgcctagttagacacacgacgaactaggggctactagtaacggccgccagtgtgctcggtacggccagaatggccatctggattcagcagggggtgattgcggttacatcatgtacggaaaaataattctaatccttgatttaaatttgaacttgactatttatttattctttatttcattttgtaaatcattttatgtatctcctggcaagcaattttatccaccttgcaccaacaccttcgggttccataatcaaaccaccttaacttcacaccatgctgtaactcacaccgcccagcatctccaatgtgaaagaagctaaaatttaataaacaatcatacgaagcagtgacaaaataccagatggtattaatgcttcgataaaattaattggaaagtataaaatggtagaaaataataaattataattaatttaagtaagataaaaaataattaaaaactaaaatgttaaaattttaaaaaaattattttaaataatatttaaaaacattaaaaatcattttaaaaaatttatttatagaacaattaaataaatatttcagctaataaaaaacaaaagcttacctagccttagaagacaacttgtccaacaattagatgatacccattgcccttacgttttctttaacatcaattattgtttttgtcaacaagctatcttttagttttattttattggtaaaaaatatgtcgccttcaagttgcatcatttaacacatctcgtcattagaaaaataaaactcttccctaaacgattagtagaaaaaatcattcgataataaataagaaagaaaaattagaaaaaaataacttcattttaaaaaaatcattaaggctatattttttaaatgactaattttatatagactgtaactaaaagtatacaatttattatgctatgtatcttaaagaattacttataaaaatctacggaagaatatcttacaaagtgaaaaacaaatgagaaagaatttagtgggatgattatgattttatttgaaaattgaaaaaataattattaaagactttagtggagtaagaaagctttcctattagtcttttcttatccataaaaaaaaaaaaaaaaatctagcgtgacagcttttccatagattttaataatgtaaaatactggtagcagccgaccgttcaggtaatggacactgtggtcctaacttgcaacgggtgcgggcccaatttaataacgccgtggtaacggataaagccaagcgtgaagcggtgaaggtacatctctgactccgtcaagattacgaaaccgtcaactacgaaggactccccgaaatatcatctgtgtcataaacaccaagtcacaccatacatgggcacgcgtcacaatatgattggagaacggttccaccgcatatgctataaaatgcccccacacccctcgaccctaatcgcacttcaattgcaatcaaattagttcattctctttgcgcagttccctacctctcctttcaaggttcgtagatttcttccgtttttttttcttcttctttattgtttgttctacatcagcatgatgttgatttgattgtgttttctatcgtttcatcgattataaattttcataatcagaagattcagcttttattaatgcaagaacgtccttaattgatgattttataaccgtaaattaggtctaattagagtttttttcataaagattttcagatccgtttacaacaagccttaattgttgattctgtagtcgtagattaaggtttttttcatgaactacttcagatccgttaaacaacagccttatttgttgatacttcagtcgtttttcaagaaattgttcagatccgttgataaaagccttattcgttgattctgtatggtatttcaagagatattgctcaggtcctttagcaactaccttatttgttgattctgtggccatagattaggattttttttcacgaaattgcttcttgaaattacgtgatggattttgattctgatttatcttgtgattgttgactctacagccatggctgcaactactcttacatctgctttacctggtgctttcagttcatcccagagaccaagtgctcctttcaacttacaaagatcacctagagtgcttagaaggttcaacagaaagacaggacgtcaacctcgtggacttgttcgtgctgcaaaggctcaagcggcgcaaaacctgccagagaaattcgatgaaacaagactctgggaggccctcaggggatttggggttagtccaagtagggttacttacgctcccgtcggattcggagattaccactggaccgtcacagatgaagacgggagaccttggttcgcaactgtcagtgacctcgaacacaaagagcattgcgggcagggagcacaagcagcccttaaaggactcagacaagctatggacactgccctcgcacttagagatagggacggactcagattcgtggttgctccagtggcagcaacagatgggggtggccctgtccttccccttgacgctaggtatgcactcacagtcttccctcacgtcccaggaagaacaggagagttcggacaaagactcacagaggcagagagggacagactgcttgctcttctggcagaactccacggaagaacacctcctgaaacaaccccaccagccgatatggaaccaccaggacttcctggtgttagagcagcactcgccgaaagtgaaggaccttggagtggaggaccatttgcagaacccgctagacttcttctcagagaacacgaggccacactgcacgcaagactcgctgaattcgaagccctcgtcgcaagagttaagggtcgtggagcacctcttgtcgttacccacggagaaccacacccaggcaacttgatcctcggagaggaaggctatctcctcgtggactgggatacagttggactggctccagctgaaagggatttgagtctcatctcagacgacccagctgacctcgcaagatacgcagagcttacaggaagaactccagacccagacgcactcgcactctatagactgcgttggagtctccttgatgtggctgagttcgtcgagtggttcagggctgaacaccaaagaacccaagacaccgagagtgcatggaaggggttcactgacacacttgggcaattggctgctggtggatcagctgcatagcaaacttatctctgttatgaatcagaagaagttcatgtctcgtttcatttaaaactttggtggtttgtgttttggggccttgtaaagcccctgatgaataattgttcaactatgtttccgttcctgtgttatacctttctttctaatgagtaatgacatcaaacttcttctgtattgaaattatgtccttgtgagtctctttatcatcgtttcgtctttacattatatgtgctacttttgtctaatgagcctgaaaagtggctccaatggtacgcactggaagatttgttggcttctggtagatatagcgacagtgttgagcttgtaatatcatgtctcttattgctaaattagttcctttcttaacagaaaccttcaaagtttttgtttttgttttcatttacctaatgtacacatacgctggccatgactaacaacatgtccaggcttagagcatatttttttctagcttaaattgttaacttgtcattcagtaaaatccgagaattgtgaagctctaattgaagctaattcgttttataaagtcagttaaaaagtatactaaattatccaacttttcttcaaaatctcaaaattctatgacaaaacgatagtctttgtttatgtcagtaccacaaagaggtggaaaaaaacaccaaaaaaacaataagcaaactatacactgagaagaaaaataaaagagagctcaatagatgttttatactaacggtagattagatcaaagatccaagctttactctacatagagcagaacccagaatcccttcatatctcttttattctagcaccgataatctactgaaaagaagacacttagagctctgtctctttgtcaaagaagtcccagccgtcatccagaagctccttacgttcattaacagaggccgcaattggatcgggtttacttattttgtgggtatctatacttttattagatttttaatcaggctcctgatttctttttatttcgattgaattcctgaacttgtattattcagtagatcgaataaattataaaaagataaaatcataaaataatattttatcctatcaatcatattaaagcaatgaatatgtaaaattaatcttatctttattttaaaaaatcatataggtttagtatttttttaaaaataaagataggattagttttactattcactgcttattacttttaaaaaaatcataaaggtttagtatttttttaaaataaatataggaatagttttactattcactgctttaatagaaaaatagtttaaaatttaagatagttttaatcccagcatttgccacgtttgaacgtgagccgaaacgatgtcgttacattatcttaacctagctgaaacgatgtcgtcataatatcgccaaatgccaactggactacgtcgaacccacaaatcccacaaagcgcgtgaaatcaaatcgctcaaaccacaaaaaagaacaacgcgtttgttacacgctcaatcccacgcgagtagagcacagtaaccttcaaataagcgaatggggcataatcagaaatccgaaataaacctaggggcattatcggaaatgaaaagtagctcactcaatataaaaatctaggaaccctagttttcgttatcactctgtgctccctcgctctatttctcagtctctgtgtttgcggctgaggattccgaacgagtgaccttcttcgtttctcgcaaaggtaacagcctctgctcttgtctcttcgattcgatctatgcctgtctcttatttacgatgatgtttcttcggttatgtttttttatttatgctttatgctgttgatgttcggttgtttgtttcgctttgtttttgtggttcagttttttaggattcttttggtttttgaatcgattaatcggaagagattttcgagttatttggtgtgttggaggtgaatcttttttttgaggtcatagatctgttgtatttgtgttataaacatgcgactttgtatgattttttacgaggttatgatgttctggttgttttattatgaatctgttgagacagaaccatgatttttgttgatgttcgtttacactattaaaggtttgttttaacaggattaaaagttttttaagcatgttgaaggagtcttgtagatatgtaaccgtcgatagtttttttgtgggtttgttcacatgttatcaagcttaatcttttactatgtatgcgaccatatctggatccagcaaaggcgattttttaattccttgtgaaacttttgtaatatgaagttgaaattttgttattggtaaactataaatgtgtgaagttggagtatacctttaccttcttatttggctttgtgatagtttaatttatatgtattttgagttctgacttgtatttctttgaattgattctagtttaagtaatcatggcctcctccgagaacgtcatcaccgagttcatgcgcttcaaggtgcgcatggagggcaccgtgaacggccacgagttcgagatcgagggcgagggcgagggccgcccctacgagggccacaacaccgtgaagctgaaggtgacgaagggcggccccctgcccttcgcctgggacatcctgtccccccagttccagtacggctccaaggtgtacgtgaagcaccccgccgacatccccgactacaagaagctgtccttccccgagggcttcaagtgggagcgcgtgatgaacttcgaggacggcggcgtggcgaccgtgacccaggactcctccctgcaggacggctgcttcatctacaaggtgaagttcatcggcgtgaacttcccctccgacggccccgtgatgcagaagaagaccatgggctgggaggcctccaccgagcgcctgtacccccgcgacggcgtgctgaagggcgagacccacaaggccctgaagctgaaggacggcggccactacctggtggagttcaagtccatctacatggccaagaagcccgtgcagctgcccggctactactacgtggacgccaagctggacatcacctcccacaacgaggactacaccatcgtggagcagtacgagcgcaccgagggccgccaccacctgttcctgtagttttgtgatctgatgataagtggttggttcgtgtctcatgcacttgggaggtgatctatttcacctggtgtagtttgtgtttccgtcagttggaaaaacttatccctatcgatttcgttttcattttctgcttttcttttatgtaccttcgtttgggcttgtaacgggcctttgtatttcaactctcaataataatccaagtgcatgttaaacaatttgtcatctgtttcggctttgatatactactggtgaagatgggccgtactactgcatcacaacgaaaaataataataagatgaaaaacttgaagtggaaaaaaaaaaaaacttgaatgttcactactactcattgaccataatgtttaacatacatagctcaatagtatttttgtgaatatggcaacacaaacagtccaaaacaattgtctcttactataccaaaccaagggcgccgcttgtttgccactctttgtgtgcaatagtgtgattaccacatctccacattcaatatattccctgaattatctgacgattttgatggctcactgttttcccaagtcttgaattgtcttctgtgcgccagtcaaatgcatatgtgttgagtttatcttttaaatatcaagcttttgtttttaacttttgtttgtaaccaaaaactcacagtaggagtttgatcacataattttatgtttgcctttgcaatttctagtgagtctttgattaaaagcttgaaaagaaaatgcagccaagcttaccaagtaagttatgtgtattaaccagaggaagagagaatcttgcaaaatttcaacaaacacaaaaagaagtattactacgattggtggagaaagaaaacgattccaaatcttgaactgttgttgtaaaagcatagcagaaagtgggagacaaccgaaatagaaatgactataacttaatttaatgttatcattataatttcttctagcaaatatttagaaagtaaatatcacatcaacctttaatgtaattaagctttctctttttgattcatgtgagatgaaaagaaaaaaaagaagagaaaagtgtagaaaacacatcatttctaagctgaagctgaggtacaaattaattaataagtgactagggtcacgtgaccctagtcacttatgattccgatgacttcgtaggttcctagctcaagccgctcgtgtccaagcgtcacttacgattagctaatgattacggcatctaggaccgactagttcttatgtgcttctagtctccaaatgtggttgatagttattttgctctaagatcaacagtaatgaagtataaatcatcgttgtggtgtgctactcggttaattgagcattaacacacacaaacatgacgaggatggtataatctccaaaaatgtgtactttgttaggtgggaccctatagccttgattaatgtgctatgttaggcatgcctggaaacgtgtgacgcatatgttttgtgaacctgttgatattatatgtgcttttatattaccatattttattaaaatactaatatttattactagtaagatataacattctatctagcttaaaaactaaccataaatattccataataactagatttaccaaactaatatactaaatatacataataaatacaaaattaacaagacaataatcaatatttatgagcttaatatatttagacattatggttggtcgacgataatcatgctaacttttcgtaattgcttgattgaaatatgcttagaataatgcctctttgttctacatggcaaatagggaccattatggtgtaacaccctgggaaccacaaacaccccgaaatgctactaaactacacaactaaccttcatatataaaatttcgacagcatctcctttgaaaatttgcatagacgtggaagcaacagagtataaacagatctagctagctaagtttaaacggccggccaaacgtgcaagcgctactagacaattcagtacattaaaaacgtccgcaatgtgttattaagttgtctaagcgtcaatttatttacaattgaatatatcctgcca

SEQ ID NO: 176 - DNA, 286 bp, Artificial Sequence
  PCR Target1
ccggaatcggacctcgggacgtcgccaaagttagctaggtgtccttagcgtttcttaggttctaggcgttaggggtcaataggttagcctagaagtcccgcactaacagcctagcttaacagttccaagctaagccactagactagccctatccgactaacctagtctaagccgaacggggatctaatctaagctaggcacccattagactagttcactagcgcgaccgcactaaactaggctaaaggttaatagcaactagttagctaggggacgttagctgccc

SEQ ID NO: 177 - DNA, 286 bp, Artificial Sequence
  PCR Target2
gacgtcccgaggtccgattccgggctaattaacacctagctcgccactcgactaattagggactaagcctagcgcttagccgttaaaacctagcacaccctaagcacccttagttaggttcccctcttaattaagccctagtgagcccctaagttaaggggacgctaagagccccctaacctagtattcggctagaggcgaactaggctaaacacctaagcgcacctctttaagctagatcgctagggggctaggctagagcttcgctagattagtctaagggcag

SEQ ID NO: 178 - DNA, 100 bp, Artificial Sequence
  PCR Target3
gcgactaattaactagctgtcccacggcctaactagcacttaatcccctagcctaacctaagagcgctaatctaggctagtggtcacttagggctttaag

SEQ ID NO: 179 - DNA, 64 bp, Artificial Sequence
  PCR Target4
tcgggacgtcgctagtcactgattagagacggtctgcactaactaacggctagtctcctccgac

SEQ ID NO: 180 - DNA, 59 bp, Artificial Sequence
  PCR Target5
attccggcctagtgcttagctaacgggaaacccgcttaacgattagttagtggacgggg

SEQ ID NO: 181 - DNA, 75 bp, Artificial Sequence
  PCR Target6
ccagtttagttaggccgacttattgaactagtctagggcgttaggaactctctaaggggttagcgtgttagaggc

SEQ ID NO: 182 - DNA, 73 bp, Artificial Sequence
  PCR Target7
gctagtagacgctgctagtgactaaggtttaggtatcagccctagctaaccgttagtcttcgctcctaagtgc

SEQ ID NO: 183 - DNA, 84 bp, Artificial Sequence
  PCR Target8
ttaacggcaaacgctaattagtcactaggcccaggaaacactaactaagccctagcttatcctagcgcaacctagttaggtctt

SEQ ID NO: 184 - DNA, 90 bp, Artificial Sequence
  PCR Target9
gtctaaaaacggcccctaactaacgcttagttgcccgctagattagtcccccgttagtgcctagttagacacacgacgaactaggggcta

SEQ ID NO: 185 - DNA, 81 bp, Artificial Sequence
  PCR Target10
gcgacttattgaactagtctagggcgcggctaacaacctagcttagattgccttgtctaaacccttaggctaacgcgccac

SEQ ID NO: 186 - DNA, 90 bp, Artificial Sequence
  PCR Target11
agattagtgggccaagcgtttaatcagggttaagagtggctactaacggctaggtcgctagctatttcctcgtgagaccttcttgtaact

SEQ ID NO: 187 - DNA, 83 bp, Artificial Sequence
  PCR Target12
gctcggcgttaggcttttagtccgctaggtggctagaccgaggttaggacgctagttcactaggggcctagtggtgttttaag

SEQ ID NO: 188 - DNA, 75 bp, Artificial Sequence
  PCR Target13
attaagacccgtcgtcaagtaggaattccagaaatcaacgcacggtaactaaatcctcgcgctaagctgggtcag

SEQ ID NO: 189 - DNA, 1204 bp, Arabidopsis thaliana; identical to SEQ ID NO: 45
